United States Patent Application Publication US 2018/0363030 A1 - sequence listing, part 5

SEQ ID NO: 2 - DNA, 4908759 bp, Enterobacter cloacae (residues 1,636,254-3,272,506 of 4,908,759)
  misc_feature: subsp. cloacae NCTC 9394
  misc_feature (81291)..(81471): n is a, c, g, or t
  misc_feature (113401)..(113844): n is a, c, g, or t
  misc_feature (118699)..(119439): n is a, c, g, or t
  misc_feature (121180)..(121612): n is a, c, g, or t
  misc_feature (150436)..(151186): n is a, c, g, or t
  misc_feature (153134)..(153775): n is a, c, g, or t
  misc_feature (157826)..(158214): n is a, c, g, or t
  misc_feature (177806)..(178122): n is a, c, g, or t
  misc_feature (201064)..(201582): n is a, c, g, or t
  misc_feature (246166)..(246530): n is a, c, g, or t
  misc_feature (254469)..(254836): n is a, c, g, or t
  misc_feature (257644)..(258176): n is a, c, g, or t
  misc_feature (294972)..(295391): n is a, c, g, or t
  misc_feature (305536)..(307543): n is a, c, g, or t
  misc_feature (315963)..(316446): n is a, c, g, or t
  misc_feature (354955)..(355321): n is a, c, g, or t
  misc_feature (382326)..(382728): n is a, c, g, or t
  misc_feature (403136)..(403401): n is a, c, g, or t
  misc_feature (425476)..(426053): n is a, c, g, or t
  misc_feature (521536)..(522085): n is a, c, g, or t
  misc_feature (525870)..(526254): n is a, c, g, or t
  misc_feature (545774)..(546220): n is a, c, g, or t
  misc_feature (568526)..(568708): n is a, c, g, or t
  misc_feature (585535)..(585913): n is a, c, g, or t
  misc_feature (600891)..(602229): n is a, c, g, or t
  misc_feature (608849)..(609190): n is a, c, g, or t
  misc_feature (614614)..(616103): n is a, c, g, or t
  misc_feature (638097)..(638365): n is a, c, g, or t
  misc_feature (650504)..(651137): n is a, c, g, or t
  misc_feature (659571)..(659859): n is a, c, g, or t
  misc_feature (663344)..(663891): n is a, c, g, or t
  misc_feature (679855)..(680656): n is a, c, g, or t
  misc_feature (690110)..(690561): n is a, c, g, or t
  misc_feature (700489)..(700815): n is a, c, g, or t
  misc_feature (709721)..(710055): n is a, c, g, or t
  misc_feature (717718)..(717892): n is a, c, g, or t
  misc_feature (727313)..(727860): n is a, c, g, or t
  misc_feature (738895)..(739366): n is a, c, g, or t
  misc_feature (759081)..(760393): n is a, c, g, or t
  misc_feature (766475)..(766913): n is a, c, g, or t
  misc_feature (775208)..(775516): n is a, c, g, or t
  misc_feature (780559)..(781176): n is a, c, g, or t
  misc_feature (783821)..(784433): n is a, c, g, or t
  misc_feature (789592)..(790187): n is a, c, g, or t
  misc_feature (794556)..(794796): n is a, c, g, or t
  misc_feature (797767)..(798456): n is a, c, g, or t
  misc_feature (801696)..(802084): n is a, c, g, or t
  misc_feature (821162)..(821505): n is a, c, g, or t
  misc_feature (825319)..(825748): n is a, c, g, or t
  misc_feature (833050)..(833551): n is a, c, g, or t
  misc_feature (839004)..(839380): n is a, c, g, or t
  misc_feature (843907)..(844308): n is a, c, g, or t
  misc_feature (849798)..(850081): n is a, c, g, or t
  misc_feature (858249)..(858587): n is a, c, g, or t
  misc_feature (865088)..(865613): n is a, c, g, or t
  misc_feature (884141)..(884564): n is a, c, g, or t
  misc_feature (887788)..(888365): n is a, c, g, or t
  misc_feature (891793)..(892296): n is a, c, g, or t
  misc_feature (895796)..(896325): n is a, c, g, or t
  misc_feature (899291)..(899745): n is a, c, g, or t
  misc_feature (906867)..(907106): n is a, c, g, or t
  misc_feature (912125)..(912645): n is a, c, g, or t
  misc_feature (925674)..(926259): n is a, c, g, or t
  misc_feature (933227)..(933745): n is a, c, g, or t
  misc_feature (948599)..(950142): n is a, c, g, or t
  misc_feature (954819)..(955179): n is a, c, g, or t
  misc_feature (963823)..(964156): n is a, c, g, or t
  misc_feature (967376)..(967936): n is a, c, g, or t
  misc_feature (981422)..(981835): n is a, c, g, or t
  misc_feature (983894)..(985363): n is a, c, g, or t
  misc_feature (992621)..(993194): n is a, c, g, or t
  misc_feature (998086)..(998433): n is a, c, g, or t
  misc_feature (1008268)..(1008525): n is a, c, g, or t
  misc_feature (1014139)..(1015169): n is a, c, g, or t
  misc_feature (1025376)..(1026501): n is a, c, g, or t
  misc_feature (1037731)..(1038162): n is a, c, g, or t
  misc_feature (1044863)..(1045651): n is a, c, g, or t
  misc_feature (1047628)..(1048267): n is a, c, g, or t
  misc_feature (1054625)..(1054963): n is a, c, g, or t
  misc_feature (1058086)..(1058568): n is a, c, g, or t
  misc_feature (1066629)..(1068386): n is a, c, g, or t
  misc_feature (1088591)..(1089084): n is a, c, g, or t
  misc_feature (1090057)..(1091689): n is a, c, g, or t
  misc_feature (1099792)..(1100351): n is a, c, g, or t
  misc_feature (1124993)..(1125609): n is a, c, g, or t
  misc_feature (1128228)..(1128472): n is a, c, g, or t
  misc_feature (1138547)..(1138848): n is a, c, g, or t
  misc_feature (1145759)..(1146188): n is a, c, g, or t
  misc_feature (1153330)..(1153625): n is a, c, g, or t
  misc_feature (1163718)..(1164544): n is a, c, g, or t
  misc_feature (1168101)..(1170371): n is a, c, g, or t
  misc_feature (1177741)..(1178164): n is a, c, g, or t
  misc_feature (1181699)..(1183277): n is a, c, g, or t
  misc_feature (1189023)..(1189979): n is a, c, g, or t
  misc_feature (1191906)..(1192547): n is a, c, g, or t
  misc_feature (1207390)..(1207615): n is a, c, g, or t
  misc_feature (1230663)..(1231057): n is a, c, g, or t
  misc_feature (1234604)..(1236098): n is a, c, g, or t
  misc_feature (1238485)..(1239096): n is a, c, g, or t
  misc_feature (1245463)..(1245885): n is a, c, g, or t
  misc_feature (1248018)..(1248283): n is a, c, g, or t
  misc_feature (1278220)..(1278818): n is a, c, g, or t
  misc_feature (1290444)..(1290778): n is a, c, g, or t
  misc_feature (1294630)..(1294927): n is a, c, g, or t
  misc_feature (1299330)..(1299799): n is a, c, g, or t
  misc_feature (1302504)..(1303186): n is a, c, g, or t
  misc_feature (1309021)..(1309238): n is a, c, g, or t
  misc_feature (1311923)..(1312953): n is a, c, g, or t
  misc_feature (1319241)..(1319589): n is a, c, g, or t
  misc_feature (1324853)..(1325307): n is a, c, g, or t
  misc_feature (1339554)..(1339796): n is a, c, g, or t
  misc_feature (1341866)..(1342377): n is a, c, g, or t
  misc_feature (1350709)..(1351175): n is a, c, g, or t
  misc_feature (1356162)..(1356656): n is a, c, g, or t
  misc_feature (1374235)..(1374568): n is a, c, g, or t
  misc_feature (1387096)..(1387506): n is a, c, g, or t
  misc_feature (1397306)..(1397635): n is a, c, g, or t
  misc_feature (1409284)..(1409757): n is a, c, g, or t
  misc_feature (1412895)..(1413509): n is a, c, g, or t
  misc_feature (1429027)..(1429676): n is a, c, g, or t
  misc_feature (1432723)..(1433175): n is a, c, g, or t
  misc_feature (1441393)..(1442169): n is a, c, g, or t
  misc_feature (1443977)..(1445781): n is a, c, g, or t
  misc_feature (1447218)..(1449049): n is a, c, g, or t
  misc_feature (1450470)..(1451008): n is a, c, g, or t
  misc_feature (1460745)..(1461036): n is a, c, g, or t
  misc_feature (1464265)..(1464519): n is a, c, g, or t
  misc_feature (1489755)..(1491033): n is a, c, g, or t
  misc_feature (1493350)..(1493785): n is a, c, g, or t
  misc_feature (1495985)..(1496816): n is a, c, g, or t
  misc_feature (1499178)..(1499454): n is a, c, g, or t
  misc_feature (1514104)..(1514549): n is a, c, g, or t
  misc_feature (1517482)..(1518356): n is a, c, g, or t
  misc_feature (1523787)..(1524244): n is a, c, g, or t
  misc_feature (1540196)..(1540540): n is a, c, g, or t
  misc_feature (1558802)..(1559078): n is a, c, g, or t
  misc_feature (1570385)..(1570999): n is a, c, g, or t
  misc_feature (1575273)..(1576027): n is a, c, g, or t
  misc_feature (1581871)..(1582173): n is a, c, g, or t
  misc_feature (1591113)..(1591613): n is a, c, g, or t
  misc_feature (1596364)..(1596917): n is a, c, g, or t
  misc_feature (1600270)..(1600599): n is a, c, g, or t
  misc_feature (1602903)..(1603711): n is a, c, g, or t
  misc_feature (1607596)..(1608046): n is a, c, g, or t
  misc_feature (1620537)..(1621025): n is a, c, g, or t
  misc_feature (1630263)..(1631244): n is a, c, g, or t
  misc_feature (1645125)..(1646495): n is a, c, g, or t
  misc_feature (1658810)..(1659245): n is a, c, g, or t
  misc_feature (1661774)..(1662323): n is a, c, g, or t
  misc_feature (1671611)..(1671932): n is a, c, g, or t
  misc_feature (1674755)..(1675241): n is a, c, g, or t
  misc_feature (1684968)..(1685172): n is a, c, g, or t
  misc_feature (1695050)..(1695483): n is a, c, g, or t
  misc_feature (1706970)..(1707413): n is a, c, g, or t
  misc_feature (1711703)..(1711998): n is a, c, g, or t
  misc_feature (1717155)..(1717561): n is a, c, g, or t
  misc_feature (1725832)..(1726271): n is a, c, g, or t
  misc_feature (1732289)..(1733157): n is a, c, g, or t
  misc_feature (1734949)..(1735175): n is a, c, g, or t
  misc_feature (1738092)..(1739249): n is a, c, g, or t
  misc_feature (1764118)..(1764551): n is a, c, g, or t
  misc_feature (1767496)..(1767936): n is a, c, g, or t
  misc_feature (1770729)..(1771057): n is a, c, g, or t
  misc_feature (1774424)..(1774774): n is a, c, g, or t
  misc_feature (1784278)..(1784653): n is a, c, g, or t
  misc_feature (1796858)..(1797148): n is a, c, g, or t
  misc_feature (1813933)..(1814339): n is a, c, g, or t
  misc_feature (1821309)..(1822004): n is a, c, g, or t
  misc_feature (1824737)..(1825053): n is a, c, g, or t
  misc_feature (1828500)..(1828802): n is a, c, g, or t
  misc_feature (1836695)..(1837034): n is a, c, g, or t
  misc_feature (1841563)..(1841769): n is a, c, g, or t
  misc_feature (1848533)..(1848860): n is a, c, g, or t
  misc_feature (1852218)..(1852548): n is a, c, g, or t
  misc_feature (1856666)..(1857235): n is a, c, g, or t
  misc_feature (1873233)..(1874018): n is a, c, g, or t
  misc_feature (1877248)..(1879275): n is a, c, g, or t
  misc_feature (1883455)..(1883948): n is a, c, g, or t
  misc_feature (1899936)..(1900333): n is a, c, g, or t
  misc_feature (1909807)..(1910354): n is a, c, g, or t
  misc_feature (1914506)..(1914882): n is a, c, g, or t
  misc_feature (1966706)..(1967053): n is a, c, g, or t
  misc_feature (1969911)..(1970413): n is a, c, g, or t
  misc_feature (1972445)..(1973201): n is a, c, g, or t
  misc_feature (1986565)..(1986937): n is a, c, g, or t
  misc_feature (1992351)..(1992929): n is a, c, g, or t
  misc_feature (1997326)..(1998035): n is a, c, g, or t
  misc_feature (2001337)..(2002270): n is a, c, g, or t
  misc_feature (2007364)..(2007764): n is a, c, g, or t
  misc_feature (2021973)..(2022265): n is a, c, g, or t
  misc_feature (2028562)..(2029141): n is a, c, g, or t
  misc_feature (2034721)..(2035038): n is a, c, g, or t
  misc_feature (2054966)..(2055192): n is a, c, g, or t
  misc_feature (2069191)..(2069539): n is a, c, g, or t
  misc_feature (2073986)..(2074272): n is a, c, g, or t
  misc_feature (2084746)..(2085107): n is a, c, g, or t
  misc_feature (2090169)..(2090517): n is a, c, g, or t
  misc_feature (2095614)..(2097167): n is a, c, g, or t
  misc_feature (2106615)..(2106974): n is a, c, g, or t
  misc_feature (2114580)..(2114944): n is a, c, g, or t
  misc_feature (2131682)..(2132022): n is a, c, g, or t
  misc_feature (2134789)..(2135327): n is a, c, g, or t
  misc_feature (2138216)..(2138756): n is a, c, g, or t
  misc_feature (2141515)..(2141979): n is a, c, g, or t
  misc_feature (2167201)..(2168494): n is a, c, g, or t
  misc_feature (2175793)..(2176033): n is a, c, g, or t
  misc_feature (2197629)..(2197945): n is a, c, g, or t
  misc_feature (2203977)..(2204394): n is a, c, g, or t
  misc_feature (2208026)..(2209167): n is a, c, g, or t
  misc_feature (2217424)..(2217780): n is a, c, g, or t
  misc_feature (2227089)..(2227560): n is a, c, g, or t
  misc_feature (2249456)..(2250666): n is a, c, g, or t
  misc_feature (2254557)..(2254839): n is a, c, g, or t
  misc_feature (2264519)..(2264976): n is a, c, g, or t
  misc_feature (2274429)..(2274729): n is a, c, g, or t
  misc_feature (2297109)..(2297573): n is a, c, g, or t
  misc_feature (2304217)..(2304694): n is a, c, g, or t
  misc_feature (2308121)..(2308738): n is a, c, g, or t
  misc_feature (2313573)..(2314013): n is a, c, g, or t
  misc_feature (2333815)..(2334108): n is a, c, g, or t
  misc_feature (2340649)..(2341084): n is a, c, g, or t
  misc_feature (2361318)..(2361709): n is a, c, g, or t
  misc_feature (2370124)..(2370552): n is a, c, g, or t
  misc_feature (2397192)..(2397626): n is a, c, g, or t
  misc_feature (2411162)..(2411484): n is a, c, g, or t
  misc_feature (2423375)..(2423767): n is a, c, g, or t
  misc_feature (2431224)..(2431594): n is a, c, g, or t
  misc_feature (2444435)..(2444963): n is a, c, g, or t
  misc_feature (2450673)..(2450950): n is a, c, g, or t
  misc_feature (2460851)..(2461227): n is a, c, g, or t
  misc_feature (2466335)..(2466804): n is a, c, g, or t
  misc_feature (2566683)..(2567604): n is a, c, g, or t
  misc_feature (2576460)..(2576879): n is a, c, g, or t
  misc_feature (2590271)..(2590754): n is a, c, g, or t
  misc_feature (2604244)..(2604726): n is a, c, g, or t
  misc_feature (2617075)..(2617609): n is a, c, g, or t
  misc_feature (2620435)..(2620650): n is a, c, g, or t
  misc_feature (2625363)..(2625935): n is a, c, g, or t
  misc_feature (2628221)..(2628577): n is a, c, g, or t
  misc_feature (2646182)..(2646528): n is a, c, g, or t
  misc_feature (2648612)..(2649110): n is a, c, g, or t
  misc_feature (2662317)..(2662623): n is a, c, g, or t
  misc_feature (2668669)..(2669195): n is a, c, g, or t
  misc_feature (2700194)..(2700425): n is a, c, g, or t
  misc_feature (2703902)..(2704733): n is a, c, g, or t
  misc_feature (2738531)..(2739042): n is a, c, g, or t
  misc_feature (2756448)..(2756732): n is a, c, g, or t
  misc_feature (2776105)..(2778043): n is a, c, g, or t
  misc_feature (2779912)..(2779912): n is a, c, g, or t
  misc_feature (2779931)..(2782016): n is a, c, g, or t
  misc_feature (2784533)..(2786197): n is a, c, g, or t
  misc_feature (2787671)..(2787972): n is a, c, g, or t
  misc_feature (2789019)..(2790466): n is a, c, g, or t
  misc_feature (2792394)..(2793783): n is a, c, g, or t
  misc_feature (2795812)..(2797375): n is a, c, g, or t
  misc_feature (2801023)..(2801964): n is a, c, g, or t
  misc_feature (2802802)..(2804450): n is a, c, g, or t
  misc_feature (2805992)..(2807542): n is a, c, g, or t
  misc_feature (2808864)..(2810592): n is a, c, g, or t
  misc_feature (2812640)..(2814071): n is a, c, g, or t
  misc_feature (2816390)..(2816789): n is a, c, g, or t
  misc_feature (2821739)..(2822419): n is a, c, g, or t
  misc_feature (2853332)..(2853707): n is a, c, g, or t
  misc_feature (2858457)..(2858855): n is a, c, g, or t
  misc_feature (2863937)..(2864172): n is a, c, g, or t
  misc_feature (2876638)..(2877011): n is a, c, g, or t
  misc_feature (2882678)..(2883816): n is a, c, g, or t
  misc_feature (2889568)..(2889886): n is a, c, g, or t
  misc_feature (2906061)..(2906302): n is a, c, g, or t
  misc_feature (2914803)..(2915384): n is a, c, g, or t
  misc_feature (2921051)..(2922462): n is a, c, g, or t
  misc_feature (2929678)..(2930018): n is a, c, g, or t
  misc_feature (2956835)..(2957335): n is a, c, g, or t
  misc_feature (2965986)..(2966507): n is a, c, g, or t
  misc_feature (2978406)..(2978885): n is a, c, g, or t
  misc_feature (2983008)..(2983386): n is a, c, g, or t
  misc_feature (2987086)..(2987770): n is a, c, g, or t
  misc_feature (2992989)..(2993392): n is a, c, g, or t
  misc_feature (3002401)..(3002925): n is a, c, g, or t
  misc_feature (3037465)..(3037740): n is a, c, g, or t
  misc_feature (3049415)..(3049785): n is a, c, g, or t
  misc_feature (3056404)..(3056749): n is a, c, g, or t
  misc_feature (3063521)..(3064048): n is a, c, g, or t
  misc_feature (3078959)..(3079552): n is a, c, g, or t
  misc_feature (3082903)..(3083179): n is a, c, g, or t
  misc_feature (3126402)..(3126808): n is a, c, g, or t
  misc_feature (3145152)..(3145572): n is a, c, g, or t
  misc_feature (3156864)..(3157429): n is a, c, g, or t
  misc_feature (3164539)..(3165004): n is a, c, g, or t
  misc_feature (3170336)..(3171088): n is a, c, g, or t
  misc_feature (3175207)..(3175439): n is a, c, g, or t
  misc_feature (3189455)..(3189866): n is a, c, g, or t
  misc_feature (3197369)..(3197771): n is a, c, g, or t
  misc_feature (3236756)..(3237212): n is a, c, g, or t
  misc_feature (3269441)..(3269655): n is a, c, g, or t
  misc_feature (3281986)..(3282506): n is a, c, g, or t
  misc_feature (3292322)..(3293864): n is a, c, g, or t
  misc_feature (3306700)..(3307078): n is a, c, g, or t
  misc_feature (3311779)..(3312110): n is a, c, g, or t
  misc_feature (3318429)..(3318753): n is a, c, g, or t
  misc_feature (3333055)..(3333269): n is a, c, g, or t
  misc_feature (3347109)..(3348037): n is a, c, g, or t
  misc_feature (3350410)..(3351230): n is a, c, g, or t
  misc_feature (3362763)..(3363120): n is a, c, g, or t
  misc_feature (3372910)..(3373744): n is a, c, g, or t
  misc_feature (3401986)..(3402444): n is a, c, g, or t
  misc_feature (3418421)..(3419227): n is a, c, g, or t
  misc_feature (3422476)..(3423753): n is a, c, g, or t
  misc_feature (3436511)..(3436947): n is a, c, g, or t
  misc_feature (3500844)..(3501083): n is a, c, g, or t
  misc_feature (3506313)..(3506518): n is a, c, g, or t
  misc_feature (3511295)..(3511705): n is a, c, g, or t
  misc_feature (3552717)..(3553206): n is a, c, g, or t
  misc_feature (3571681)..(3572563): n is a, c, g, or t
  misc_feature (3577620)..(3578004): n is a, c, g, or t
  misc_feature (3581987)..(3582349): n is a, c, g, or t
  misc_feature (3588576)..(3588916): n is a, c, g, or t
  misc_feature (3600562)..(3600821): n is a, c, g, or t
  misc_feature (3607129)..(3607444): n is a, c, g, or t
  misc_feature (3612073)..(3612805): n is a, c, g, or t
  misc_feature (3619109)..(3619845): n is a, c, g, or t
  misc_feature (3622855)..(3623785): n is a, c, g, or t
  misc_feature (3629954)..(3630346): n is a, c, g, or t
  misc_feature (3641939)..(3643331): n is a, c, g, or t
  misc_feature (3645119)..(3647479): n is a, c, g, or t
  misc_feature (3666883)..(3668415): n is a, c, g, or t
  misc_feature (3682801)..(3683216): n is a, c, g, or t
  misc_feature (3685244)..(3687056): n is a, c, g, or t
  misc_feature (3691638)..(3692028): n is a, c, g, or t
  misc_feature (3702641)..(3703140): n is a, c, g, or t
  misc_feature (3706667)..(3708621): n is a, c, g, or t
  misc_feature (3720819)..(3721135): n is a, c, g, or t
  misc_feature (3726887)..(3727329): n is a, c, g, or t
  misc_feature (3744688)..(3744954): n is a, c, g, or t
  misc_feature (3752990)..(3753385): n is a, c, g, or t
  misc_feature (3768813)..(3769274): n is a, c, g, or t
  misc_feature (3795795)..(3796062): n is a, c, g, or t
  misc_feature (3803627)..(3803911): n is a, c, g, or t
  misc_feature (3808941)..(3809274): n is a, c, g, or t
  misc_feature (3814740)..(3815277): n is a, c, g, or t
  misc_feature (3825156)..(3825399): n is a, c, g, or t
  misc_feature (3827496)..(3828825): n is a, c, g, or t
  misc_feature (3854715)..(3855918): n is a, c, g, or t
  misc_feature (3874299)..(3874682): n is a, c, g, or t
  misc_feature (3882339)..(3882746): n is a, c, g, or t
  misc_feature (3891853)..(3892170): n is a, c, g, or t
  misc_feature (3898253)..(3898683): n is a, c, g, or t
  misc_feature (3904348)..(3904781): n is a, c, g, or t
  misc_feature (3915032)..(3915332): n is a, c, g, or t
  misc_feature (3932415)..(3932769): n is a, c, g, or t
  misc_feature (3946974)..(3947616): n is a, c, g, or t
  misc_feature (3958257)..(3959674): n is a, c, g, or t
  misc_feature (3966656)..(3967098): n is a, c, g, or t
  misc_feature (3974318)..(3974683): n is a, c, g, or t
  misc_feature (3989468)..(3989915): n is a, c, g, or t
  misc_feature (3996581)..(3997034): n is a, c, g, or t
  misc_feature (4014312)..(4014882): n is a, c, g, or t
  misc_feature (4017278)..(4018830): n is a, c, g, or t
  misc_feature (4022675)..(4024197): n is a, c, g, or t
  misc_feature (4029471)..(4029804): n is a, c, g, or t
  misc_feature (4040673)..(4041132): n is a, c, g, or t
  misc_feature (4053895)..(4054228): n is a, c, g, or t
  misc_feature (4062618)..(4063314): n is a, c, g, or t
  misc_feature (4069191)..(4069663): n is a, c, g, or t
  misc_feature (4077678)..(4077882): n is a, c, g, or t
  misc_feature (4085795)..(4086603): n is a, c, g, or t
  misc_feature (4101225)..(4101828): n is a, c, g, or t
  misc_feature (4108007)..(4108408): n is a, c, g, or t
  misc_feature (4118140)..(4118318): n is a, c, g, or t
  misc_feature (4123764)..(4125001): n is a, c, g, or t
  misc_feature (4129564)..(4130775): n is a, c, g, or t
  misc_feature (4132628)..(4133298): n is a, c, g, or t
  misc_feature (4139071)..(4139982): n is a, c, g, or t
  misc_feature (4144248)..(4144637): n is a, c, g, or t
  misc_feature (4147187)..(4147528): n is a, c, g, or t
  misc_feature (4159358)..(4159741): n is a, c, g, or t
  misc_feature (4168151)..(4168591): n is a, c, g, or t
  misc_feature (4179179)..(4180821): n is a, c, g, or t
  misc_feature (4183892)..(4184400): n is a, c, g, or t
  misc_feature (4187214)..(4187822): n is a, c, g, or t
  misc_feature (4189921)..(4191037): n is a, c, g, or t
  misc_feature (4204252)..(4205079): n is a, c, g, or t
  misc_feature (4216481)..(4216917): n is a, c, g, or t
  misc_feature (4231834)..(4233185): n is a, c, g, or t
  misc_feature (4261821)..(4262200): n is a, c, g, or t
  misc_feature (4279165)..(4279862): n is a, c, g, or t
  misc_feature (4290777)..(4291037): n is a, c, g, or t
  misc_feature (4294843)..(4295910): n is a, c, g, or t
  misc_feature (4298486)..(4299460): n is a, c, g, or t
  misc_feature (4305389)..(4305942): n is a, c, g, or t
  misc_feature (4314086)..(4314624): n is a, c, g, or t
  misc_feature (4335227)..(4335580): n is a, c, g, or t
  misc_feature (4344650)..(4345162): n is a, c, g, or t
  misc_feature (4375458)..(4375811): n is a, c, g, or t
  misc_feature (4379265)..(4379760): n is a, c, g, or t
  misc_feature (4390439)..(4390961): n is a, c, g, or t
  misc_feature (4395737)..(4396002): n is a, c, g, or t
  misc_feature (4428033)..(4428289): n is a, c, g, or t
  misc_feature (4435201)..(4435779): n is a, c, g, or t
  misc_feature (4439201)..(4439573): n is a, c, g, or t
  misc_feature (4458114)..(4458609): n is a, c, g, or t
  misc_feature (4479874)..(4481741): n is a, c, g, or t
  misc_feature (4483889)..(4484409): n is a, c, g, or t
  misc_feature (4496806)..(4497089): n is a, c, g, or t
  misc_feature (4519229)..(4519585): n is a, c, g, or t
  misc_feature (4532326)..(4532623): n is a, c, g, or t
  misc_feature (4538599)..(4539007): n is a, c, g, or t
  misc_feature (4586547)..(4586947): n is a, c, g, or t
  misc_feature (4589921)..(4590672): n is a, c, g, or t
  misc_feature (4598951)..(4599322): n is a, c, g, or t
  misc_feature (4631846)..(4632175): n is a, c, g, or t
  misc_feature (4656260)..(4656619): n is a, c, g, or t
  misc_feature (4673739)..(4675018): n is a, c, g, or t
  misc_feature (4683826)..(4685023): n is a, c, g, or t
  misc_feature (4714181)..(4714460): n is a, c, g, or t
  misc_feature (4747903)..(4748347): n is a, c, g, or t
  misc_feature (4758905)..(4759468): n is a, c, g, or t
  misc_feature (4764378)..(4764953): n is a, c, g, or t
  misc_feature (4767494)..(4769486): n is a, c, g, or t
  misc_feature (4775598)..(4776046): n is a, c, g, or t
  misc_feature (4787731)..(4788004): n is a, c, g, or t
  misc_feature (4793869)..(4794440): n is a, c, g, or t
  misc_feature (4796656)..(4797090): n is a, c, g, or t
  misc_feature (4868442)..(4868766): n is a, c, g, or t
  misc_feature (4872217)..(4873407): n is a, c, g, or t
  misc_feature (4875477)..(4875935): n is a, c, g, or t
  misc_feature (4881433)..(4881992): n is a, c, g, or t
catcccaggaacgcgctcaccacaaacaccgtatggaacagcatacgcaccggcgccagcaggaccgagaacagcacttccagcagcagtgaaagggtcacgcggcagaaaccaccgtactccttcgaacctttgcaccagatcagaatgatactgagcagcttaggcaggaacagcagcaccatggtcgacgcgaacagcgcgatcgccagctccggacgccactgcggccacaccgggaacagctggcgcggttgcaggaaatactgcggctccgtcagggcatgcacaacctgcaacgcggttgagagcgccaggaacataaaccacagcggcgcagacagataggacataacgcccgtcaggaacaccgcacggtgaacagggtgcatccctttcaccaggaacaggcggaagttcatcaggttaccgtgacaccagcggcggtcgcgtttgagctcatccagcaggttcggcggcagctcttcatacgagccaggcagatcgtaggcaatccagacgccccaccctgcgcgacgcatcagcgcagcttccacaaagtcatgcgacagaatggacccggcaaacgacccttcacccggcagcggcgccagggcgcagtgctcgatgaatggcttcacgcggataatggcgttgtggccccagtagtgggattcacccaactgccagaagtgcagaccggcagtaaacagcggcccgtagacgcgggtcgcaaactgctggcagcgcgcatacagcgtgtccataccggacgcttttggcgaggactgaataattcccgcgttcgggttggcttccatcagacggaccagcccgctcaggcagtcgccgctcatcacggagtctgcatccagtaccaccatgtagctgtactggttaccccagcgacgacagaagtcatcaatgtttccgctcttacgcttaacacgacgacgacgacgacggtagaagatctgcccttcgccctgcacctcggcaatcagctccatccaggctttttgctccgccacgcagatatccggattgtagctgtcgctcaggatatagacgtcgaaatgcgccgcgttaccggtcgcctttacggactcccaggtagcacgcagcccggcgaatacgcggtcaacgtcttcgttacagataggcatgatcagcgcggtacggtgctcaggattgaggggttcatccccgaccgtcgacgcggaaatgctgtatttgtcacgccccatcagcagttgcaggaagcccatcagcgccgtccagaacccggcggagacccaacagaacagcaccgcgaacagcagaagaatgccgctctgtaaaatatacggcagcagctgcatgaaggagacccagatatcctggccaatcatgtcagcagggttaatcaacgcccagccctggtacggcagaatggttttcatgtaccaggttgcgacaaccgtctgcgccagcgtcagcagcagcagaatgtaacgacgaatcgttcccacggtacgccatttctgctcggatgcctgctgttctttggtcagacgtgacagatagcgcggcgtcacgtcacgcccacgcaggcgatcccagaagcggcccaccgggttggtgcgccacggatcggggaacatggaggaacgcgtggccttcggcatcgcctgtagctggtcacgcccttcgtcatccttgattagctgcccttctgccagcgagtccggccatgcctgctccagacgtgccttcactgaccccagcggcgtatcatcatcacgggaaaagtgacgatgttcaccatccagcgcggtgtgaaccgcgcggatgtcgctcgcagggagtgccgctttttcaatgtccgtcagcggcatggcatcaatatattcagatgtattattcattggcaggtagctgatagctccaggtttcactcagcggcttatcgttactgaccagcgcggcgcgcatttcagtggtctgtttcggatctttcaccttcacgcgcagggtcaaacgccaccctttggtgaccgggttgtaacgcacggcgttctcaacgatttcaccgttatcgccaatgctggcctgtgccgtcacggcagtatccggcgccagttttttcatatcctgcccggtgaagtccacgataaatgccagcgtgccatccggctgacgaatcaggttggactgcttcacgtcacccgtcgaacgacgcgtctgcataacatacgcgttatccggtgcgtgcagtttgtcttcgtcacggctgaaggtgatcgcatacttgaagttcatctctttaccggcttccggcagctgatccggtgtccagtacgccacaatgttatcgttggtttcatcgttagttggaatttcaaccagctcaaccttgcctttaccccagtcgcctttcggcgttacccaggcgcttggacgcagatcgtagcggtcatccagatcttcaaagcgggagaactgacggccacgttgcagcagaccaaagccctgcgggttttccatcgcaaagctgctgacggcgaggtgtttcgggttgttcagcggacgccagatccactcgccgttacccgcatgaatggagaggccgttggaatcatgcagttcaggacggaaattggtcgccggagagggctggttcggcccgaacaggaacatgctggtcagcggcgcgacgcccagtttgcccactttatcgcgcaggtaaactttagactgtacgtcaaccaccgtgtcacgccctggcatgatcacgaagcgataagcgcctgtcgcacgaggggagtccagcagcgcataaattgtcagacgtttgtcggttggttttggacgttcgatccagaactcgcgaaaacgtggaaattcttcacctgatggcagcgcggtatcaattgccagaccgcgcgcagaaagcccgtacacctgccccgcgccaatcacgcggaagtagctggcgccaagcatgctgacgatttcgtcgtttttatctttgctgttaatcgggtaaagcaccttgaagcctgcgaagccgaggtctttcaccgtgtctttatcgtgttgtacatcgccaaaattgaaataatccgggctgtacttgattttgcgtaccgcggtcgccgtcacttcattgatggcaaccggcgtgtcgaagtacataccctggtggtaaaattcaagcttgaacggggttttaatattgttccagtacgctttatcgtgattgaactggatctgctgatagtccgcgtatttcatgtcgcggaaaacggagggcaggttactttttggcgcttcgtagctcttgcccgccatcgatttagcctgttttgcgacatcatcgatgttaaaggccagtgcagatgaggtatacagtgacaacagcactgctacacccaaccaacgcattttcatcatttgtggtttatgtttcataataagtaagcacttccccctttgtgtgcttatatcgatccgatccattttaatggaaactcaggcaatccgacaacattatcactgctttgttcagctcgctggctcatggattaagcaaatgaaagaacccgcttttcactttgcgtgcttatcctggagacagggtgtcggtcttggtgtagggttggctccgaatgtaaccattatgagccttagggataaggcgaaaagtctgagaatgcgcaaagttatatgagcacaacccctgtacaacgtgaatatttcctcgactcgatccgtgcatggctgatgctattggggatcccttttcatatttcactgatctattccagccacacctggcacgtgaacagccagatgccctcctggtggctgacgctgtttaatgattttatccatgccttccgcatgcaggtgttttttgtcatttccggttatttctcttacatgctcttcttgcgctatcccctcaaacgatggtggaaagtgcgcgtggagcgcgtgggcataccgatgttgacggccattccgctgctgacgctgccgcagttcatcatgttgcagcatgttaaaggcaaggcggaaaactggccgaatctctccttctatgagaaatacaacaccctggtctgggagctgatttcccacctctggttcctgctggtactggtggtgctaaccacggtgagtttgttgatcttcagccagctgcgccagcgcgcgagcaccgcatcctcgaccttcttcgccaacatcaccctgggcaagctgtctctgctgtttcttgcgctgggggtcgcgtatgccgccgtcaggcgtatcctgctcattgtctaccctcccattctgagcgatgggctgtttaatttcgtggtgatgcagaccctgttttacattcccttcttcctgattggggcgctggcatttattcatccccggcttaaagcgctgtttaccaccccctccccctggtgtgcggtgggtgctgcgctggcctttgccgcctatcttctcaatcagcgctatggcagcggggacgcgtggatgtatgagacagagagcgtgataacgatgctgatgggcctgtggatggttaacgtggtgttcgcccttggccatcgtctgctgaattttaaatccagccgcgttacctatttcgttaatgcttcgctgtttatctacctggttcaccatccgctgacgctgtttttcggggcgtacattacgccgcatattgcctcgaatgcgctgggcttcttcaccggcctggtctttgtggttggcattgccatcgtgttgtatgaaatccacctgcggatcccgcttttgcgtttcctgttctcaggcaaacctcaggttaaagcgggataacaaaacggcgcctccagggcgccgtttttgcattcagacatcaaaatgcctggctgcgcgcggtcaaaatccgctgatacaggtcggcggtgtgctcatcgaagcagacaaaaatgactttttccggcatgggtttgagggaaaggtagtgataaacggtattcacggcgattgtagctgccgcttcctttggataaccgtacacgccggtgctaatggcggggaacgccatggtcttatacccgttatccgccgcaagccgcaggcagttccgatacgcctgctccagaatctcagcctcatggcggtcgccaccgtgccagacgggtccaacggtatggatcaccgctttggccgggagatcgcccgcaagcgtaataacagcatgccccggcgggcactctccctgctgctgacgcacggttttgcatgcttcaaggagttgagggcctgcggcccggtgaatggcaccgtccaccccgcccccacccatcagggaggaattggctgcgttgacgatcacgtcaacgtgtaccgtcgtgatatcgccatgaataacgtcgatttgcggtctcataaacaccctctgcaacccgcctttttcatcagtgtatcgcagagggagaaggagaaaaactgccgcgaaaaaaacgtcggttagcggtaatccacctgaacgaccgcaagcgttttctgttcattcaggtatttcatgctgacagcggccagatctgaatgaggatgatggccccggagcgcctcgtcataactgatggtatgcgttttcatacggttattttccggacaggagatcgcaaactgctgatgccggggcgtgacttcgcacgggtcagcgaccaccgcgccacgaaaatgaatcaccccaccattttctatagttgctgaataagccggagataaaaaagaggacaggatcagtcccagaccagaaataatacacgctgcggatttgaacattatttgtactcctcaatgaaattcgtccttgaggggtaaaaacgctccgttatgacgtatcaatttaagcaacccgatgactgggttcttgatatcagcatagcttacctgtgcagcgccgccactttattaaatcattgatttcatgaattattaaagcgtacttaccggtgcgttccactgctgtgataaatgaagcgattttccatcggaaacggtgacgattatttttaccgcctcccctgaacgaatatttaaactgattcgcgttaaatcaatcggctgattagcgggtataaaaagagtatttttctgccgcgatgtactttgtcccgcttgcccttgtcggacagataacacctcaacctgacattcgcaggcgtctgccagcgtgacctgaggaataatggttgtcatatttgcctgctgtgaggtgctgaacgttatctggctggcaagcgcggcaagaagaatgaaggtgctcatgagatcctcccgaaaaaaaacagggcgcatgccctgttttttggtacagaaatgaatcagtactgatgtgcggtcgcgttgttgccaaagccaacctggtgcacagtcaccgttgagccggacgctgtctggtctaccgccgcgccgttgccgccgccgaactgtttcacgttgataacagagtctttgctattccactggtcgatggtggcgctgttaccaaagcctttttgcagcagatcgatagaactgtcatcagagccctggccaacatctgcaccgttaccgccaccgtgctgggtaatggttaattcagaatctcgggcgtccgtctgcaaagcaagtgcggagttaccgccgccgtactggtaaatgctcagggttgagtcagggccgttattgccgccaccccaaccaccaccgtggccgccgccaaattgtggtaccgcacctgcgaaagcactgccagaaactacgattgctgcaataactgccactttgaaaagtttcatggtaaacccccatcggattgattaaggcgtcacacatcgctagcgttgaataacgcgaatagccatttgcgactgtctctgcactacaactgctgttttctgcgtaccatactgcgttatattcgccctgttacccgagcctttctggataatcatggcggtgttgccaaaagcgccctgcttaatactcgcatcgttgccgttgccggtctgatcgatataagcaaggttatacgtccctgactgatcaacatgcgcgtggttattcccgccctcctgggaaataatggacagcaatttagaaccgccctggcgtacatcagcattattacctgaaccctgttgaccaataatggctgcctgattgtatgaagctttacttaattcatttatcgcaaaattatattcagaactggctaaatctgaatcacctgcgattacaaacccaggcgcacccagtaatgtaaacatcataaacaacgttttgtttttcatgctgtcaccctggacctggctataaaataggtatgtctttacccgttaacgcgattcgttttgttaacgccgcgttacggaaaagagtatgtctgccgaaacatatttaatatctcacccgtgtgccttatttttatatgctcattcacctcaaagtcgtaaatctcgcctgaaacgacgcgacacaccactaatgcagaaataaattcttgtctgtgcgcctggacaacagcgagacaggctgtccaatctgtaccggcttctacagacaaacacggcaatgtcttttgccaggtgcgtgacacgaagcaagttttcttaagaaaaatttccagcttagagaagtcttaactttttagctgagttcatactttttaccggctggcttacaataattaaaagactcaataattcaattctttataatatattgtatgactttcaaaatctgtgcacgtttatacacctgtacaactttccccttatcttaaaatctactcaccctgcaaaatacacaacttaatatcgaattttacattctgttacatgattaacacttgctttaaagtttgcaatagctagattgaaaacagcagtacgttatttgtttttaattttaccgcctcctttggaggaaggttttttaactacacacagcagtgccacacctgtcagtacttctggtgcccttttcaataatacgagggcagctgccgggtgtcataaataacgtggggtttcatcatgtttaatgaagtccatagcttacccggtcatacattattgttgatcacaaaaccttccttacaagcgacagcattattgcagcatttaaaacaatgcctctcgcttaacgggaaactgcataatattcaacgttcttttgatgatatcgctcctggcagcatcattcttctcgatatgatggaagcggataaaaaactggtccattactggcaggacaatttaagcaggaaaaacaataatatccgcgtattgttattaaatacgcctgatgagtatcctttccgcgatattgagagttggccgcatattaacggcgtgttttacgtcactgaagaagaaaaccgtgtcgtggagggtttgcagggcatattgcggggggagtgttatttctcgcaaaaactggccagctacctcattacccactccggaaattatcgctataacagttcagaatctgcacttctgacgcaccgtgagaaagagatcctgaacaaactgcgtattggtgcttcaaatattgaaatcgcccgttcgttatttatcagcgaaaatacggttaagacgcatctttataatcttttcaaaaagatagctgttaaaaatcgcacgcaggcggtgtcgtgggcaaacgataacctcaggcgttaatagcatgaaacgcaccctaagttggattgccgccgcaggcattatgcttgctgccggaaaccttcaggctgttgaggtggaagttcccggactgttgaccgaccacaccgtcacctctgtcggacacgatttttatcgtgccttcagcgataagtggnnnnnnnnnnnnnnnnnnnnnnnnnnnnnnnnnnnnnnnnnnnnnnnnnnnnnnnnnnnnnnnnnnnnnnnnnnnnnnnnnnnnnnnnnnnnnnnnnnnnnnnnnnnnnnnnnnnnnnnnnnnnnnnnnnnnnnnnnnnnnnnnnnnnnnnnnnnnnnnnnnnnnnnnnnnnnnnnnnnnnnnnnnnnnnnnnnnnnnnnnnnnnnnnnnnnnnnnnnnnnnnnnnnnnnnnnnnnnnnnnnnnnnnnnnnnnnnnnnnnnnnnnnnnnnnnnnnnnnnnnnnnnnnnnnnnnnnnnnnnnnnnnnnnnnnnnnnnnnnnnnnnnnnnnnnnnnnnnnnnnnnnnnnnnnnnnnnnnnnnnnnnnnnnnnnnnnnnnnnnnnnnnnnnnnnnnnnnnnnnnnnnnnnnnnnnnnnnnnnnnnnnnnnnnnnnnnnnnnnnnnnnnnnnnnnnnnnnnnnnnnnnnnnnnnnnnnnnnnnnnnnnnnnnnnnnnnnnnnnnnnnnnnnnnnnnnnnnnnnnnnnnnnnnnnnnnnnnnnnnnnnnnnnnnnnnnnnnnnnnnnnnnnnnnnnnnnnnnnnnnnnnnnnnnnnnnnnnnnnnnnnnnnnnnnnnnnnnnnnnnnnnnnnnnnnnnnnnnnnnnnnnnnnnnnnnnnnnnnnnnnnnnnnnnnnnnnnnnnnnnnnnnnnnnnnnnnnnnnnnnnnnnnnnnnnnnnnnnnnnnnnnnnnnnnnnnnnnnnnnnnnnnnnnnnnnnnnnnnnnnnnnnnnnnnnnnnnnnnnnnnnnnnnnnnnnnnnnnnnnnnnnnnnnnnnnnnnnnnnnnnnnnnnnnnnnnnnnnnnnnnnnnnnnnnnnnnnnnnnnnnnnnnnnnnnnnnnnnnnnnnnnnnnnnnnnnnnnnnnnnnnnnnnnnnnnnnnnnnnnnnnnnnnnnnnnnnnnnnnnnnnnnnnnnnnnnnnnnnnnnnnnnnnnnnnnnnnnnnnnnnnnnnnnnnnnnnnnnnnnnnnnnnnnnnnnnnnnnnnnnnnnnnnnnnnnnnnnnnnnnnnnnnnnnnnnnnnnnnnnnnnnnnnnnnnnnnnnnnnnnnnnnnnnnnnnnnnnnnnnnnnnnnnnnnnnnnnnnnnnnnnnnnnnnnnnnnnnnnnnnnnnnnnnnnnnnnnnnnnnnnnnnnnnnnnnnnnnnnnnnnnnnnnnnnnnnnnnnnnnnnnnnnnnnnnnnnnnnnnnnnnnnnnnnnnnnnnnnnnnnnnnnnnnnnnnnnnnnnnnnnnnnnnnnnnnnnnnnnnnnnnnnnnnnnnnnnnnnnnnnnnnnnnnnnnnnnnnnnnnnnnnnnnnnnnnnnnnnnnnnnnnnnnnnnnnnnnnnnnnnnnnnnnnnnnaatgaccagcgcccaaatcacaccgctcatcagagtacagccggagatgaagagccctttgagaccaccctgcgggcaggcgaaataggccgtgcagccaagaaaaccagcccagctcaacaagccgagagagacagccacccaaccccagaggccggagaggatgccagtcgtgattgcaatacaaagtaatatgttcatggtgcgcatcttagcagatgcgcaccttagaaatgagatcagaagcacattacgtgcaagttgaaatgtatcgttgcaggatttttgtgattcaaatcactcttcgttctcttcttccagctcgtcccacatggcagcgatggcgtcacgcgtcagcggagccagcgttctccagaacggcgaggtggcgtgggcttcaactttacccaggaaggtgccaacccacggaagcaaatacgtttcgaacagggtttcaatcgcctcgttctcatcatcacctgcattatcttcaatccaggaggccgccagcagcagggtaccgatatgatcggcaggcatatccgtcagcggcatgccccgttctgaaagaaacgcccgaacttccgcttcggtcgcaccttcctgccaggcagaacgatacggcgacacgcgacactcttcccccacaaacagcgcgttgtaatccgttgaaatctgctgcatatcgcagcttttttgcaaacgttccagcaattcatcctgttccagcggccagctctgcgccagtttaccttcacgaatcagggtaaacagcggaaccagcagcggatcctgcggctggcggtaatataaggtgcccagcacgcggcaaaggatggaaaactcattcatgtttttattccgttattaattaaagatcggcaaattcatcaatcggcgccatgccgcgcgactcaaggaagtcgagcatacgacgcggcgtgacgttcaggatctgttcttccgggaaattcacgtcccgcaatattttcaggcactcgctgaaatcacccagcgtgaaggccgtgtgtgaatcagagcccagcgccaccatgccgcccgcgtcacgcacggccgccgccacttcgcggcagttggcttcactgcccttacgcgagtgaacaaaggaggagttgttaatctccagcgccacgcggtgcttcgctgccgcctgcgccacggcctgaatatcaatcgggtatttcggatttcccgggtggctaataatgtgcacgttgccgctggcaatagtggcaatcatcgctgcggtgttggtctctttatcctggggcgcaaagaccggctcgtggaagccggcgaggatcagatctaacgaggtcagcatcgggccggtgcagtcaatttcaccgtcggtatttttgatgttcgcttcgatgccgcgcagtatcccgataccgtccaccaggcgtggccagatacgcatattcacaaaatgccagtagtgcggcgcatccgccatatccggaccgtgatcggttatcgcaaacagtttaatgcctttcagcttcgcctgagcgatataatcatggaggttactgtaagcgtgggtactggcgacggtgtgcatatgcaggtcaacgggatacatctttctctcctctgcggtttttccaaaggatagcagttatcagcggcgaatattagcaaaaacccggcgaacgccgggtttctctcagtagcctcgctgtctgtcgacctgcccggtcaccgcgttgcccttctctatttcgctgatggtatgcgagatgtacgccacggcctccgccggtcgcgtcacggccgcaatatggggcgtcatcgccacgcgcggatgtgcccagagcgggctgtcttttggcagcggttcgcggctatacacatccagcattgcgcctttcagtttaccgctatccagcgctttcagcagatcgtcttccacaacgtgtaccccgcgcgccaggttcattaagtagctgtcttctgccaactggttgaggagcgtgccattgataatgccgaccgtttccgccgtattcggcagcaggttaataaggacgcgagtccctttcaggaacgccgggagttcgtccgttccggcaaagctctcgacgcctggataatccttacggctccggctccagcagcgcagtgggaagccccacggtgcgagcgcttcggcgactttcgaacccagtacacccgcgccgaggatgccgatggtgaaatcttcatgctgataatccgcaagcggttcccagtgggattgctgtttaaacgcctgataatcgtcgaaacgtcggaaccagtgcagcacctggctcacggcatattcctgcatctgctgccccataccggtatcttccagacgaaacaggggaatatcctccggcagcatttcagggtgtgccttcagcttactgagaatggaatccacacccgcaccaagagcaaacaccgccttcaaacggcgtccctgaagcatttcgaccgggggatgccagaccagcgcgtagtcggcatgttcattatcgccctgtttccattcgcgaacgcgtgcgccaggcagtgccgccgtaagcgcgttaatccagtaagccgtatcaaaagtggggtgatagaagataatatccatagtcattgccttttattgcgctgttttattttcattttcaactggcttgccagcataacaaatttatcgctaaaccgcgttgctgataaaagaggcgcatttcgcacatttcggaatcaggttgcctgaagtttgtctaaacacgctaaattactgaaaaagtgggttgacggcagtacggcttttccttacattagcgcccgtcccgacaacaacgggatgacaatatggtgaggtgtccgagtggctgaaggagcacgcctggaaagtgtgtatacggcaacgtatcgggggttcgaatccccccctcaccgccatatttgaagaagagctcgcatgaaaatgcgggcttttttttcgtatgttgcacgcctttgggggggatgagaacccccgaccggggttcgacaactggcgcagccagttggacagactgagagcgtagcgaacaggctgcccgcagggcgagcgaagcgagtcaatccccccctcaccgccatattaaagacgttcgctccctgcgccctttatgtcgggtggcgctacgcttacccgacctacaaaaagctagtcttcaaccatctttgcatactcttcggtgagaaaatccaccagcgtcctgaccgacggcagcaggccgcgccgggaaggatacaccgcgtggatcacttcccgtctgggttcccaggcattcagcacccgaacaagttcacctgaagccagctgatccttcaccatcaaaatgggcagctgtaccacgcccacgcccgccatcgccgcctcccgcagcgccagcatgtcggtagtcaccaggcgcggcgtgaagtgaatttctgcctttgcgccctccggcccgctcaattcccacttatgcaggtgcttgcccgcccccatacttaaccccggccactcgctgagttcagagggcatcgccgggttgcccatccgttcaatcagtgccggcccggcaaccagacagtgccccctgtccgccagcacccttaataccagatcgctgtcatcaaacgggcgcggacgaacgcggatcgccacatccaccccctccgccaccagatcgacccggcggttggtggcttcgagctggaggttgatccctggatagcgcgccataaaccgcgccagcatgggccccacgtgaacgtgcagcaaggtgacaggacaggtgagcctgaccataccgcgcggctcagcctgtaaagcagccaccgcctcctccgcagcttcagcttccaccagcatggctttacagtgctgatagaacgtctgccccacctccgtcaccgcaaactgccgcgtggtacgttggatcaaccgaacgcccaggcgttcttccagctgcgcaatccgacggctcagtttcgacttaggctgatcgagcgcccgacccgccgccgcaaagccaccatgctccaccaccttcacaaaccatacgaaatcattgagatcctgcatacgcctctattgttccatttaaggaacagtgaatgtcatttttgctatctaccgggatattaaccctgaatataagctaattccatcaacaggacatcaggagttaatcatgaaaaacgtaacaggcgtgtataccgcacctcggccgcactgggtcggtgacggttttccggttcgttcgatgttttcttaccagacgcacggcgagcccctgagcccgttcctgctgctggactacgccggaccgcataccttcccggcggacggcgcgaaacgcggcgtgggcgagcatcctcatcgcggttttgaaacggtgaccatcgtctactcaggcgaagtggagcaccgtgattccaccggcagaggcggagttattggcccaggcgatgtgcagtggatgacggcaggcgcaggcattttgcacgaggagttccactccagcgcgttttcgcagaaaggcggtgaactgaaaatgatgcagctgtgggtcaacctgcccgccaaagacaaaatggcgacgcctggctaccagagcatcactcagtcggatatcccggtggtcaccctgccggataacagcggaacattgcgcgtgattgctggccgttttggagaggtaaccggcccggcgcataccttctcaccgctgaacgtgtgggatctcgcgctgcgccagggtagccatctgacgctcaatcagcccgaaggctggagcacggcgctggttgtcgttgaaggcagcgtgacggtgaacggcaccacgcctgccggtgaggcgcaactggtcgtgctgagtcagagcggtgacaaactgcatctcgaagccagcagcgatgccaaagtgctgctgatggccggggagccgctgaatgaacccatcgtgggctatggcccgtttgtgatgaacagtaaaaccgaaattgccgaggctattcgcgatttcaactccggccgctttggccaaatctaaacgtaataaggagcgcattatgtctacccctgcaaacttcaacggtgcacgtcccgttattgacgtaaacgatgccgttatgctgcttatcgatcaccagagcgggctgttccagaccgtaggagacatgccaatgcctgagctgcgcgcccgtgcagcagcgctggcaaaaatcgcctcgctggcgaagatcccggtgatcaccacggcgtcggttccacagggaccgaacggcccgcttatcccggagatccacgccaacgcgccgcacgcacagtatgtggcacgcaagggtgagatcaacgcctgggataacccggagttcgtggcggcggtgaaagccaccgggcgcaaaacgctgattatcgcggggacgatcaccagcgtctgcatggccttcccgtccatcagcgcggtggcggacggatataaagtgtttgcggtgattgatgcctccggcacctacagcaaaatggcgcaggagatcaccctggcgcgcgtggtgcaggcaggcgtggtgccgatggacacggctgctgttgcttccgaaattcagcgcacgtggaaccgtgaagatgcgggtgaatgggctgaggtgtacacacacatcttcccggcctaccagctgctgatcgaaagctacagcaaagcgcaggacgtggtgaaaaatagcgaagtgctcgattcgcagcgttaatcctgcgcgctgcgacataagctgattaaggcttaaccgaacaagcacgaatgctgaaaatctgcttgaccgttttagcgcaactccctatagtagcgccccgttgccccccaagcggtcaggcagcaaaacaatatggtgaggtgtccgagtggctgaaggagcacgcctggaaagtgtgtatacggcaacgtatcgggggttcgaatccccccctcaccgccatatttgaagaagagctcgcatgaaaatgcgggcttttttttcgcatgtcgcacgcctttggggggggatgagaacccccgaccggggttcgacaactggcgcagccagttggacagactgagagcgaagcgagtcaatccccccggtgcgacaggagctgcctcacctacaaaaaaagaaagcccgtacaaaagcacgggcctgtctcaaccattcctcagctattcaacttccctaccgactcctttccttcaggagatgaaacctgctcaggctgagcacgcgcttcatccttacgcttctccagccagtaatccgcatttttaatccccagccgaaccgggtcaaagtgtggatccaacccctgtgcattctggatttcataatccttcaggctggcaaacgcttttttatgcaacagaacgatggcaataatgttgagccatgccatcagccctacgccaatatcccctaatccccaggccagatccgcggtgcgtaccgtgccatataccgtcgaagccatcagacacagcttgagcaggaacgtcagccacgggcgatgaatcttacggttgatgtaggcgatattcgtttcagcgatgtagtagtaagcaatgatcgtggtgaaggcaaagaagaacagcgcgatggcaacaaagtaattaccgaagcccggcatcatactttccattgccgtctggacatatcccggtcctgcggccacgcccgctattccggtatagagcgctgcgccgtcgacgccctgcacgttatacagcccggtgatcaacagcataaacccggtcgcggagcagacaaacagcgtgtcgatgtacacggagaacgcctgaaccagcccctgtttcaccggatggcttacggccgccgccgaggaggcatgtggcccggtaccctgcgccgcctcgttggaatagacgccacgcttcacgccccacatgatggcctggcccagaatagcgccaaacccagcttcaaggccaaaagcacttttccagatcagcaatataactgaaggaagctgatcaatattgatagcgataatcacgcacgccacaataatatagccgagcgccataaacggaaccaccatactgctaaagctggcaatcctttttacgccaccaaaaataataaaactcaacagcacagcaagtaacgccgccgtgacatttgggctcagaccaaaggcaatatccaggctcgcaccaatagagtttgcctgcacacctggcagtaataatccgcaggagaaaatcgttacgatggcaaataaccatgcgtaccacttcacgcctaaccctttctcaatataaaaggcaggaccaccacgatattcgccgttaattttctctttataaacctgacctaacgtggattcgacaaaagcagagcttgcccccaaaaatgccacgatccacatccagaaaagcgcaccgggtccaccaaaggtaatggcggtcgctacaccggcaatattccctgtccccacgcggcccgccagcgtcatcgtcagcgcctgaaacgacgacacgcctgcctcggtaggacgcccctgaaacatcagggtaatcataagttttatatgccgtaattgcagaaagcgactacgcagcgagaaatagaggccgacacccagacataaaaatattaacgccgggctccagataacaccattaattgcactaaccagttcgttcatgtatgacccttagcgtgatgttccagaggaaacgatcccctggcgaatttctttttagaattttgtctgaacaagtacgaaacatagataattacccaaaagacaccaacttaatttttactgcttagtcatgttctgtgacaacattcacgtttaattttaaaccaataattagcatgatcattatattcatagatattttgtgggtattataaatacatatcacatttccgtgacctgtataaaaagcgttcgcagcaaattaacagtaatattattattaccgcaaaacggggcgtaaatcccattgaatgctataggaaataaatatgatttaaaaaagccacgcgtgcagagggaataaaggaagcttcccggcataacgccgggaagaaatgacttaaaatgtgaaatgatcttagtcggagtacacttccagcgttcgttggcacagcgctgagcggacgcagtcctcttttgtgaagcggaccacccctatcatctcatcttcctcaaaacgtgacatggcatcgctcaggccggacttcacgcccgacggcaggtcacactgggtaatatcgccgttgacgataaccgtcacgttctccccgaggcgcgttaaaaacatcttcatttgcgcagcggtcacgttctgagcctcgtcaagaataacgaccgcattttcaaatgtacgtccgcgcatataggcgaacggcgcgatttccaccttgccaatctctggtcgcaggcagtactgcataaaggaagcgcccaaccgcttcaccagcacgtcatagacgggcctgaagtacggggcaaacttctcggaaatatcgccgggcaggaagcccagatcttcatccgcttgcagtaccggacgggtaacgatgatcctttccacgtccttatgaatcagcgcctccgccgctttggcggcgctgatccaggttttcccgcatccggcttccccggttgcaaagatgagctgtttactctcgatagcattcaggtagtgcgcctgagcttcattccgcgccacaattggcgatgcatcgcggctgtcccgcgccatgccaatggattctacgccgctcatctgcacaagcgaggtgaccgattcttcttcacgctgcttatggctacgtgaatcccgtctcagcacacgttttgcttcacgacgagctttgatcactgctttctgtcttcccatggatagcaccttgagttgttggtattcatcacacgcgccagcatcggcacgattatgcgcacgaacatcagagggttggcttccttgtaagccattgcttgcattaccggatgacgatatacaacggctacgcgcaccgttatgcacgtcggtagaaaaaggttcttgaggtgaaggagagaatttggtggtgaagaaatcgctgccggagtctgagcctccgcgccgggtactgcggttgatgtgtttaccttgtccagtacaggacgcaaccattcgcgatctccatagtgagttagcatcactgccgggaactaccgctgtcttctcttaagtacatcaggaattatcataaatgcaacatttattttacctgaatgcaacttttaggactgcccctacatggaaaatcagtcttatatagaaatattacagaaatataacaataagatagtccttcgaaaaataatgtccccgcgaactgtcgcagggacgattatcaggcttctatcagaccctgagcgagccaggcgttcgcgtcacgcgcgccgggcagggcaaagaaatagccgccgccgatgggcttaatatattcctccagcgcttcgccgttgagccgcttctgcacggtgaggaatcccttctccagatcgtgctgatagcagacaaacagcagtcccatatcaagctgaccggagttggtcacccccagcgagtagctgtagcccctgcgcatcatcaggctggattgcgtctctttggtgcgaggattggcgaggcgaatatggctgtccagcgcgatgacgtccccgttcggatcgcgggcgtagttgggttcatcgtgctcgtgcttcatgccgagcggtgcgccggtttgcttatcgcgaccgaagatagtttgctgctctttcagcggcgtgcgatcccagaactccacgtggaactgaatgatacgcaccgcctgataggtgcctccgaccgcccaggccggttcgccctgatccgccgtcacccataccacgttcttcatcaacgcggtattgctgctgtccgggttggcggtgccgtctttgaagcccagcaggttgaccggcgtctctttccctttactgcgcgcggcgtggtcagagataaaaccttcccgcttccagcgcacgctcagcagatccggggtgtgcttgataatatcgcgcagggcatggatcaccgtatcctgggtattagcgcagatctgcaacagcagatcgccgtggcacagcgccgcgtcgagagaatcattcgggaatcgcgtcattttttgcagcgctttcggcttctgcttcgccagtccgtagcgatcatcaaacagcgattcccccaccgacacggtgatggtcagattatcgggagcgataaacgcgccgaggatgccggaatccatcggcggcaggcgcggattcggtgtttccggtgcgggaccgccggcggtgaggaaggcaatacgcgtggtcaacagcctgaacagacgctcaaggtcggctttatcactcgccagcgaatcgaaagccaccagcatcatcgaggcctgctgtggcgtcaggatccccgcctggtgctcaccataaaacggctgcgtttccatacgcgcatccggggagagagtgccaggggcgctttgcggttttgccgcatgcgccaccggacagcctcccgccagggcaaacgcgccgcccagcgcccctaccccttttaacaaccgacgtcgggaaggttccgccacgtcgtattcgtcatgcttgttcatcgcttaatccagacccagtacgccacgcagcagggagagatcttccgccagggtggttatcgggcctttcagcgcgttacggtcagcatcggtcagcttgtcgtaggtttcgaacccgtctttggtgcggtatttcgccaggatagcgtcaactttcttaaagttggcatccactttcgccagcagctcgccgttctctttttgcagctgaggccgcagcagctcgacaattttctgtgcgccgtcgacgttcgcctggaagtcccacaggtcggtgtggctgtaacgatcttcttcaccgctgattttgctggcggccacttcttcaatcaggcccgctgcgccacccaccactttcgacggtgggaatgccagctcgctgatgcgtttttgcagctccagcacgtcgctgttgagctgctcggcgtatttctccatcccactggtggagttatcgccaaacagggctttttccagacggtggaagccggtgaatttcggatcggtggccttctgctcgtagtcgtcttcacgggcgtcaatgctgccatcgaggtcagagaacagttcggcaatcggctcaatgcgctcgtagtgctgacgggtaggcgcatactgggatttcgctttttcgatgtcgcccgctttcaccgcgtcggtaaaggctttggtgcctgccaccaggtccgctgtctctttggtgacgtaggctttataggcggtaatggcgtcgccgaggctcagcagcgccgtgcctttggccgcgtccgccgtcgctgcgcctttgacgatcagcttacctttcgggttagtcagcaggccgcaggtcatgtcatattccccgggctgaagatttgcggtcatcttctggctgaagcccggcgcgatattctcgcgctcttccaccaccatcacgcctttcagaatttcccactccagcgccttctggctgtggttctgaataataaactgcgttttaccgctgttaaccgtgatggtcatcggctcgcactgtttatcgttgacggtgacttttacctgcggaatatctgccgcctgagcggtgaaggcagacacgaacagcgcggcaatgcctgcgcataacgcactacgacggaactgaatggccatgactcttccctttaaaagtatgttgtaactaaaacagcacttacggcgctacgcgcgacgtctgcgagccggtacgcggcggcatagcgaacaggatcagcgccggaaccagatagataaagtacatcgccacttcgctgacgctcggcgtttcctggtagccgaagatcccttcgagcagggtaccggtcagtgaatgggtcgacaggacgttgctgagatcgaacgccacgtcctggaagtggttccacagacccgcttcgtggaaggcgcggatcgcccctgccgccagccctgcggccaccagcagaataaacaggctggtccacttgaagaacgcgcccaggttaagacgaatgccgccccagtagagcaggaagccaagcacaaccgccgtggccagcccgagcaccgcgcccagcggcggccagatgcccacgtcctgctgaaaagccgcgagcaggaagaacnnnnnnnnnnnnnnnnnnnnnnnnnnnnnnnnnnnnnnnnnnnnnnnnnnnnnnnnnnnnnnnnnnnnnnnnnnnnnnnnnnnnnnnnnnnnnnnnnnnnnnnnnnnnnnnnnnnnnnnnnnnnnnnnnnnnnnnnnnnnnnnnnnnnnnnnnnnnnnnnnnnnnnnnnnnnnnnnnnnnnnnnnnnnnnnnnnnnnnnnnnnnnnnnnnnnnnnnnnnnnnnnnnnnnnnnnnnnnnnnnnnnnnnnnnnnnnnnnnnnnnnnnnnnnnnnnnnnnnnnnnnnnnnnnnnnnnnnnnnnnnnnnnnnnnnnnnnnnnnnnnnnnnnnnnnnnnnnnnnnnnnnnnnnnnnnnnnnnnnnnnnnnnnnnnnnnnnnnnnnnnnnnnnnnnnnnnnnnnnnnnnnnnnnnnnnnnnnnnnnnnnnnnnnnnnnnnnncatcatgatcagcgcccagccgtggtggttgcctttttgcagggcgttatccaccgcctgctcaagctgtaccttcacgttacgggagaccttgcgcatccagaacaccatccaggtgaggatcaccaccgcaatcacggcgacgatcccttcaaacagctcctgctctttctgcgggaactccccggtggtttcgttgatgaggataccgaggcccaggcagagcgccgcagcaaggaaaaccccaacccacatcacgccaatccagcgtccgcgctgggtacgcttcagataactggcgataaggctaacaatcagggccgcttcaaggccttcacgtaacataatgagaaaaggaacaaacatgccgacaccttaaatgtttatctcggtcaactgatgcaaagaaaagtaaattcttgtgatagtgattatcattacggcaacaagaaaaacaagcgaaatgtgttgcgttttgatgaccagatgtaaacgcattgcggagtaataattgcctgagtaaccgttacgtttataaggtataacgaaaatgcccatttacggttaaccggggctgtggctaaatgtccgcctcgaaaaccaactgaaaataagccatgtttaaaattgtccatttcctgctggcgctggtgattattcttgcgctcgcctggctggtgagtttcgaccgccgaaaaattcgtattcgtttcgttttacagctgatcgtgatcgaaatcgcgctggcgttctttttcctccacgcagaaagcggcctgtttattattaaatacgtttccggtttctttgagtcgctgcttaaattcgctgccgaagggacgaattttgtctttggcgggatgggtgaaaaagggctggcgttcattttccttggcgtgctctgccccattatttttatctcggcgctgattggtattcttcagcactggcgtattctgccgatctttattcgggtgatcgggacgctgctgtcaaaactgaacggcatgggcaagctggaatcctttaacgcggtgagttcgctgatcctcggtcagtcggaaaacttcattgcctacaaaggcgtgctgggcgatctctcctcgcgtcgtctgtttacgatggctgccacggccatgtcgacggtttcgctgtcgattgtcggggcctatatgactatgctcgacgccaggtttgtcgtcgcggcgctgatcctgaacatgttcagcacctttattattctttcggtcattaacccggtccgcccggaagcggagccggatatcaggctggaaaaactgcacgaatcccagagcttctttgaaatgctgggcgagtatattctggccggttttaaggtggcgatgattattctggcgatgctgattggctttatcgcccttattagcgccattaacgccctcttctccggcatatttggcatgagcttccagcagattctgggttatgtgttttatccgctggcgtggcttattggtattccgctgagcgatgccttaagcgcggggagcattatggcaactaaactggtggcgaatgaatttgtggcgatgatcgagctgcaaaaaatagcccatcaaatgtcaccgcgcgggctggggattttgtccgtgttcctggtatcgttcgctaacttcgcttccattggcattgtggcgggggcaataaaaggtctgaatgagcaacagggtaacgtggtgtcacggtttggtttacgccttgtatacggggcaacgctggtaagcctgctgtcggcgagctttgcggggttggtgctgtaagttttgtgcccggcggcgcttcgcttgcacgggcctacgatacaacaacggcgggttatcccgccgttttcattaaaactgcacgcacaccggctggtcgacccgcatcaccgactcctgcgcgaagcgtgatttataaattccgcgcaacgcttcgatgttcttctcgctctgcgcatctttaccgtggatcagcatcaatgccttgctcggctcgcgcgccacttttccatcattccccagccactgaccgcgcgcatcaaataccgttaaaccatcgcgaaagcgtggcgtcacgtcctggtcgacaaactgctgccattcgttgcctgtgatttgcgccccggcaggacggtttaagccgaaataaagcgtggtctgctgcatctgattttctgctttgcaggtttccaccgccgcgtgctgtgcgggtgcgctacagcccgccagcatcacgaatgctgccaccattaaccctgttttaattctcattgatgaagactcacatagatgaaaggactatcccctctccccaccggggagagggttagggtgaggggaaaattactcagcctggagcttagacggcggcgctgagtgatagtgcgcgtccgcctccgcaaagcgtttctgcatagacgcagacggcgctttacccagcaggctaaacaccacgataccgaggctgccgaagatgaagcccggaatgatttcgtacaggcccagnnnnnnnnnnnnnnnnnnnnnnnnnnnnnnnnnnnnnnnnnnnnnnnnnnnnnnnnnnnnnnnnnnnnnnnnnnnnnnnnnnnnnnnnnnnnnnnnnnnnnnnnnnnnnnnnnnnnnnnnnnnnnnnnnnnnnnnnnnnnnnnnnnnnnnnnnnnnnnnnnnnnnnnnnnnnnnnnnnnnnnnnnnnnnnnnnnnnnnnnnnnnnnnnnnnnnnnnnnnnnnnnnnnnnnnnnnnnnnnnnnnnnnnnnnnnnnnnnnnnnnnnnnnnnnnnnnnnnnnnnnnnnnnnnnnnnnnnnnnnnnnnnnnnnnnnnnnnnnnnnnnnnnnnnnnnnnnnnnnnnnnnnnnnnnnnnnnnnnnnnnnnnnnnnnnnnnnnnnnnnnnnnnnnnnnnnnnnnnnnnnnnnnnnnnnnnnnnnnnnnnnnnnnnnnnnnnnnnnnnnnnnnnnnnnnnnnnnnnnnnnnnnnnnnnnnnnnnnnnnnnnnnnnnnnnnnnnnnnnnnnnnnnnnnnnnnnnnnnnnnnnnnnnnnnnnnnnnnnnnnnnnnnnnnnatcatccccgccagcgcgccgttgcgggtcatgcgtgaccacagtacagagaacagcaccaccggaccaaatgccgcaccgaagcccgcccaggcgtagctcaccagccccaggacgcggttttccgggtttgccgccagcgcaatcgccaccagcgcaaccaccagcaccataaagcgccctacccacaccagctctttctggctcgcgcccttacgcaggaacgctttgtagaggtcttcggtgatggcgctggagcacaccagcagctgacagctcagggtggacatcaccgccgcgaggatcgcggagagcagaataccggcaatccacgggttgaacaggatctgcgccagctcgatgaacacgcgctcggcgttctggttcaccgcgcccgcctgcgccgggttgttgttgaagtacgcgataccgaagaagccgaccgcacacgcccccgccagacacaggatcatccacgtcatgctgatgcgacgcgcgtgaacgatggtgtggtgagaatccgccgccatgaagcgcgccagaatgtgcggctggccgaagtagcccaggccccagcccatcagagagacaatggcgacgaagttcagccctttcagcatatcgacgttttcgatgctcttctgcttgatcacttccagcgattcgccaaagccgccgacggtgaaaatgacaatcaccggagtcaggatcagggcgaagatcatcaggctcgcctgcacggtatcggtccagcttaccgccaggaatccgcccacgaaggtatagaggatggttgctgcggcgccggcccacagggcggtttcatagctcatgccgaaggtgctttcgaacaggcgcgcgcccgccacgatgccggaggcacagtagatggtgaagaacagcaggatcaccaccgcggagataatgcgcaggatacggctgttatcttcaaagcgtccggtgaagtagtccggcagcgtcagggcgttgttgttggcttcggtgtgcacgcgcagacggcctgccaccagcttccagttgatccacgcgccaacggtcaggccgatggcgatccagctttcggagataccggagatgaaaatcgcgcccggcagccccatcagcagccagccgctcatgtcggaagcgcccgcagagagtgcggtgaccatcgggcctaagctgcgcccgccgaggatgtagtcgtcaaagtttttagtggaacgccatgccaaaaaccctatcaggatcatgccaaaaatataaacgagaaatgtcaccagcatcggtgtgctaatagccattcaaattctccaaaatgtcgagcgacaaccgtccgggttgccttgttatgtcatcaccggaacgtagtgatgtgtgtatgtgtttccgttgggcgcgctatcctgccgtatacgcatcccactgacaaacgatttaacactgcatttacatgaatttcatccctggttttatacgtctttcctataggttgcactcgctcacgcttttacgggttgcacctttaaaaagtgttaagcaccgcataaaaactgggctcagaaaccgccgcacgttctttttcacagctaactaatcgttaacaatccattcattttccagcttgcagaccaggtcacatttaacacggttgcacaaagttgcaacatggtggatatttcacgctatcaacagaacgctattacagaacaacaggagttttggcatggggatgaccaccatgggggttaagctggatgacgctacccgcgaacggattaaaaccgctgcgacccgcatcgaccgcacaccgcactggttaatcaagcaggcgatttttaactatctggaaagactggagagtgaagaaggtctgccggagctgcctgccctgctggcgggtgcagcgaacgaaagcgaagaggccgcgacggctgttgaagagaaccaccagccgttcctggaatttgccgagcagatcctgccgcagtccgtcagccgcgccgccattaccggcgcctaccgccgtgccgaaaccgacgccgtgccgatgctgctggagcaggcgcgcctgccggaagccgttgccgctcaggcgcacagcctcgcgtatcagctcgccgacaagctgcgtaaccagaaaaccgccagcggacgcgccggtatggtgcagggtctgttgcaggagttctccctctcctcgcaggaaggcgtggcgctgatgtgtctggcggaagcgctgctgcgtattccggataaagccacccgcgatgccctgatccgcgacaaaatcagtaacggcaactggcactcccacattggccgcagtccgtccctgttcgttaacgccgccacctggggcctgctgtttaccggcaagctggtctccacccataacgaagccaacctgtcgcgctctctgaaccgcatcatcggcaagagcggcgagccgctgatccgcaagggcgtggacatggcgatgcgcctgatgggcgagcagttcgtcaccggggaaaccattgccgaagcgctggcgaacgcccgcaagctggaagacaaaggcttccgctactcctacgacatgctgggtgaagcggcgctgaccgccgccgacgcgcaggcctacatggtctcttaccagcaggcgatccacgccatcggtaaagcgtccaacggtcgcggtatttatgaaggtccgggcatctctatcaagctttccgccctgcacccgcgctacagccgtgcgcagtacgaccgggtgatggaagaactctacccgcgcctgaagtccctgaccctgctggcgcgccagtatgacatcggcatcaacatcgacgccgaagaggcggaccgtctggagatctccctcgacctgctggaaaaactgtgcttcgagccggagctggcgggctggaacgggattggtttcgttatccaggcctaccagaaacgctgtccgttcgtcattgactacctgattgacctggccagccgcagccgtcgccgcctgatgatccgtctggtgaagggcgcctactgggacagcgaaatcaaacgcgcccagatggaaggtctggaaggttatccggtctatacccgcaaggtctataccgacgtctcttacctcgcctgcgcgaaaaaactgctcggcgtgccgaacctgatttatccgcagttcgccacccacaacgcccacaccctggcggcgatctacagcctcgcgggtcagaactactatccgggccagtacgagttccagtgcctgcacggcatgggtgaaccgctgtacgagcaagtgaccggtaaagtggccgacggcaagctgaaccgtccgtgccgaatctatgccccggtaggtacccacgagaccctgctggcctacctggtgcgtcgtctgctggagaacggggcgaacacctccttcgttaaccgcatcgccgataccaccctgccgctggacgaactggtggccgatccggtacaggccgttgagaagatggcggcgcaggaaggccagattggtctgccgcatccgaagattgccctgccgcgcgagctgtatggtgcaggccgcgtcaactcggcgggtctggatctggcgaacgaacaccgtctggcgtcgctctcttccgccctgcttaacagcgcattgcagaagtggcaggccaggccgatccttgagcagtccgttgaggacggtgaaatgcagccggtgatcaacccggcagagccgaaggacatcgtcggctacgtgcgcgaggccacggaagcggaagtggagcaggccctggagagcgcggtgaacaacgcgccaatctggtttgctaccccgccgcaggagcgtgccgccattctggaacgcgcggcggtgctgatggaagatcagatgcagcagctgatcggcattctggtgcgtgaagcgggtaaaaccttcagcaacgccatcgccgaagtgcgcgaggcggtcgacttcctgcactactacgccggtcaggtgcgcgatgatttcgacaacgaaacccaccgtccgctcggcccggtggtatgtatcagcccgtggaacttcccgctggcgatcttcaccggccagattgccgcggcgctggccgcaggcaacagcgtgctggcaaaaccggcagagcagaccccgctgattgccgcccagggcattaacattctgctggaagcgggcgtaccggcgggcgtggtgcagctcctgccagggcgcggtgaaacggtcggggccaaactgacctccgataaccgcgtgcgcggcgtgatgtttaccggttcgaccgaagtggcctccctgctgcaacgcaacatcgccacccgtctggatgcgcagggccgtcctaccccgctgatcgctgaaaccggcggcatgaacgccatgatcgtggactcctccgcgctcaccgagcaggtcgtcgttgacgtgctggcctctgccttcgacagcgcgggccaacgctgttccgctctgcgcgtactgtgcttacaggatgacgtggctgaccacacgctgaagatgctgcgcggtgcgatggcggaatgccgcatgggcaacccgggccgtctcaccaccgacatcgggccggtgatcgacgcggaagccaaagccaacattgaaaatcacattcagaccatgcgtgccaaaggccgtccggtgttccaggcggtgcgcgagaacagcgaagatgcccgcgagtggcagaccggcaccttcgtgccgccaacgctgattgagctggcaagcttcgacgagctgaaaaaagaggtcttcggtccggtactgcacgtggtgcgctacaaccgtaacaacctcaacgagctgatcgatcagatcaacgcctcgggttacggcctgacgcttggcgtgcatacccgtatcgacgaaaccattgcccaggtgaccggcaatgctaaagtcggcaacctgtacgtcaaccgcaacatggttggcgcggtcgtgggcgtgcagccgttcggcggtgaaggtctctccggcaccggcccgaaagcgggcggtccgctctatctgtaccgcctgctggcgaaccgtccggaaaatgcgctgggcgtaacgctggcgcgtcaggacgcggaatatccggtggatgcgcaggtgaaagccgtgctgacccagccgctggacgcgctgattaagtgggctgaaaatcgtcccgagctgcatgcgattgcacagcagtacggcgagctggcgcaggcgggaacacagcgtctgctgccgggtccaaccggtgagcgcaacacctggacgctgatgccgcgcgagcgtgtgctgtgcgtggcggataacgaggaggatgcgctggtgcagctggcagccgcaacggcaacgggctgtgaggtgctgtggccggaagatgccctgcatcgcgacctcgccaaacagttgccaaaagcggtctcggcccgcattcgctttgcgaaggccgatgccctgctgacccagccgtttgacgcggtgatctaccacggtgattccgaccagctgcgcgaactgtgcgagcaggtggcggcccgcagcggcgcgattgtctcggtgcagggcttcgcccgcggggagaccaacctgctgctggagcgcctgtacgttgagcgctcgctcagcgttaacaccgcggcggcgggcggtaacgccagcctgatgacaatcggctaacgctgtgctaataaggctccggagacggagccttattttattggggagtgtatgaaacgatatcttatcgcaggcgcagcactgctgctcagcgccagcgcgctggccgacgagtgcgacaaagcgaccacccagacagaactcagtgcctgtgcggcagagcagtaccaggctgcggataaaaagctcaaccagacgtaccaggccgccatcaaacgcgcggcagcccctcagcgcgacctgctgaaaaaggcgcagcaggcgtggatcgccctgcgtgacgcagactgtaaattgatgggttcaggaaccgaaggtggcactattcagccgatgattatcaaccagtgcctgacggagaaaacagcggagcgcgaagcctttctggcctcgttgatgcagtgtgaagagggcaatttaagctgccctttccaaccggctgattagcgcacacggatcccttcgataatcatccgctgcacgttatccagcgtactctggaaaaacgcctcgtcctggagcgttttaccggtcaccgcctcgacctgggccgcgaagtcagcgtagtgctgggttgaggcccaaatcatgaagatcagatgatgcggatcgacgggcgccagttttccgctggcgacccatccggcaataatggccgatttatcgtccaccagctgctttaaatcgccggtcagctccgcctgcaacagcggcgcgccctgcaacatctccaggcagaacagccttgatgcctgcgggtaatcacgcgatacctccagcttcaggcgtatgtactcctctatcgccaccagcggggccagctcttcgcgaaatgctttaagtggtgcgagccagatatccaggatctgctgcatcaccgccacatacagcgcctctttcgacgggtagtagtagagcagattggtcttggacaccccggcctgctccgccacctgctcaaggcgcgtaccgtgaataccaaactgcgaaaatgtctccagcgcggcgctgaggatcgcctgtttcttggcgctcaccgcctgcgaacgtttaccgggtgttttcactgcgccttgtgtcattttcgctctccttattggtttgccatagcatagcaaaagccctgctttctctcgacattttggggagcggggctgcaccaaatcaaaaaggaaaatgtacggacaggtagacttaacagcccccttatattacaaatttgatatcacttttttctcgttaagtaagggcttttcccatgcctttagtcatacgacaagcaacattagccgattcagtattactaaaagagcttggctatcgcatctatccagcgcactttaagcatatgtggcagtcagaatcaggattgtataattatttggaatgtgaatattctcttcctgttattgagcagaatattaatgacaaaacataagctggtatatagcggaaatagatcagccgattagttttgcgaagctgacatggcaagcgactacccctaatacagacattagtggtgttcttcttgacaaactctaccttgccccaactaaaacgaatcagcattacggtcaattaatgtttaaaaaagtcatagatcttgcccgaagtgatggaaaaaaatttttatggttggaggttctcgagcaaaacgaacatgctcatagattctataaaaagcagggaatgcaatacatcagcgacatcgttttcgaaacagagtcacagcggagcatactcaagataatggggatgtgtatataacgtctgattttcgctcacagcggaccttcggtgctggctgcatcgtgtcaggagtggaccttacaaatatcagcgcgagaatcaatagagaacaaacataccagctctgggagagatcgtttcacacaggtaaagaacagacgcaatcaccaattcttataccaaatccaacctcacccgatggtttaatgttttactgttattcttctttgctgacgagagtaaaaaatgattgaccacaccggattcaacgtcataaatcttgaagacagtaagtaatgttacacaaatgttcttgccagtcttggtcatgttatccggcttgaatttccgggcaaggcggtaggttttggtcccgcccaactcgatgaagggcaagatcctggcggtgcgttctggttaacacagggaactccctccacaccccgaatgcatcttgccttcaatgcaaaaaacaaagaggatgttgaggcattccaccgtgtcgccctccaggcaggtggaaaagataatggtgcgccgggttacaggccccattatcaccctggatattacgccgcgttcatccttgatcctgatgggtacaatatagaggcggtttaacacgagacgcgatagtcgctaatatacttccccaatgctgatagacgatcctgcgcaaatattcaggcaggatcgtctgacgggtggtatcagttcagtaaaagcgttggtcaattaatgcgtttggcataattactttctctgtatcatgaaaagcgcttacatcatttcctgtatttccgttcctctgctcatagcagccggtcaactaccgtgatttctgaaggtgtatcggctgttattttacataaatggacggaacttcctgtttgtcagggtgacacggaaaaggacacaggcgatacttatcctggaagatcgagagctgactgctttagattacaacaaaactggtctgaaatattgctgaaatggcgcgttccgggtctgaatcccagaaaattggcccacgaagcaccacggtagaaaacccagttttgcagtatgggggattattatggctgaagtcgtagctcattttttgtcttcgctaacgctgcgggagtttcgtcgttaaatgcctcccatgccctgacggatatagacagaacagtctgagcatcccgaggaagcagatattacaatgaaaggatcagtgatgtataatcaatgatgccaaaattaacggtgttttttgtggtatggagactgcctgctctggcttttcttcttttggtttttatggttttaaaatacgagtccggtcttgggaaaatctcactagcagcatttatttgtttagttgcagttgttttatataggatatttttgaactgatatgttatcagtcccagtggatataaaatgctgtatgtccaagtgattgcggagaattaaaagagtgaagaaaagacggctggtgcggctcgatggctgcatccagctcttattgggagtgcatctagtgggatcgcatgatagatgattttttaatcaacattgcgagtagtggttataaatatcccgccctcccttctgcgatagtttgaaaacattacccggttcattacacatgcgactttcataaaagttatccgttgttatattatgtaaacagataagtcgtgttccataggtaacatcttcgcgatcactaggaattacttcgtgttccggtccataccaatatagtttggctttatcgccctttgcaataaatggagctggatcaccagaagcctccttatactcaaatgtaaatttttctccatcacaaaccatattcnnnnnnnnnnnnnnnnnnnnnnnnnnnnnnnnnnnnnnnnnnnnnnnnnnnnnnnnnnnnnnnnnnnnnnnnnnnnnnnnnnnnnnnnnnnnnnnnnnnnnnnnnnnnnnnnnnnnnnnnnnnnnnnnnnnnnnnnnnnnnnnnnnnnnnnnnnnnnnnnnnnnnnnnnnnnnnnnnnnnnnnnnnnnnnnnnnnnnnnnnnnnnnnnnnnnnnnnnnnnnnnnnnnnnnnnnnnnnnnnnnnnnnnnnnnnnnnnnnnnnnnnnnnnnnnnnnnnnnnnnnnnnnnnnnnnnnnnnnnnnnnnnnnnnnnnnnnnnnnnnnagacaaatctgaaccagtattgggctcgtatacagttacttttcttctctcccggtatacagagtctattgtaactattcttcggttgagttccttaggtaatcttaggtttagctcgtaatcttgtttatgctggcaacttttttgataagtttgtaacagaggaaaataaatctttttcttgcataaggttttttcgcatcaaatctcgaaattgaatgaattcatctgagtatgcatgacaaaaattaaggagtgtcaggataaaaccaaacaaacttagtaataaaaatgggacataacatacaaatatatcagtgctagatgagtaatacgcacctatagaaagtgtacataaaatcagaccaagcaatacagctaaagatgcagatttaccacgatttctttcagtgtccatcattctgaactcgatgcaatcgcaatctcctagccagcatatcctatagctattaggtgatattttatatacaatgatataaagatcgctgtttttgggaatgcattcaatggaattaaaatttggtgtgactggtctcagatcgtagtaacttaaataatagtagaactcattgtaggtgattcttacgtatgaggcattgttacctttctcatcacacattctgtcgatttttactttgtcaaaaggcaacctgaggcatttatacatatctttgcgacctaaattatgtttgatgtttatgtcctggcacaaattatagaagaaacaggtcatgaaaacaattcatacacatgatacatggatttgtgaaatatatttacatggtgaatttcccattacctgaaattggacagaacaacctgaacgtccaagctggtgattgctccgaaccgttgaattcgcagccagcagcgggcttttagttgttgtcaatgggagggtatttcagcaaaatgaggttacctttaaacacggcaattttttatgcagtctccaactattaaatctagctccggcaggagttactaactcatagaataaaggatgcacgggatcggattatgcgtactcataaacagaataagcctcgtaaactgtattgcagcgtcaacacaactacgcggcaccattctaataatccaggtgctgaatattgctgggaacgtaatcgtaaaagagtcggggatgaactactggccaagcgcgagtcaatacatggcggacagaagcatggccgagactacacaccattgttttattttctgatcaaaaagattggcaaatcgtggaatgaaatattcagcgaagtatgtgtacgtcttgataccaccgagcctgtattctggttggtcgcgctacatgagcatcagcgaagggatttattctgcattggcgaaagcagtttttatccgggtctgtttgttgatgagaatggaattctgcaagaggtaaatacttcaatcacgataaaggatgttaaggtggcttgccgctgctgcacacacacacttatattggagaatctgtaccctggatagattgaataacaacaccttttatcctgccacgggtgcggccctcatcagcaacgagagcgattactaacttttgctttttgctcaatgcggacgacccgctccccaatcccttaccgcccctgcaccgccatcgcgcaccgttgcctgtttgcgtgcatctattttgaccatttagtccactttatttgcactctattcaccaaccttgcgttaacacattaacaataaagcccttttaaaaactggcatcccctttgcaaaacccttttcacgaggctgaacaggatatgcaggatgcagcgccacgtctgactttcacccacacagagatgaagagaggttcgtgatgaaaattggcgtatttgtaccgatcggcaacaacggctggcttatctcgaccactgccccgcaatacatgccgacctttgagctgaataaagccatcgtgcagaaagcggagcactaccacttcgactttgcgctctcgatgatcaagctgcgcggtttcggcggtaagaccgaattctgggaccacaacctggagtctttcaccctgatggcgggcctggcggcggtaacctcgcgcatccagatttacgccaccgccgccacccttacccttcccccggcaatcgtggcgcggatggcctccaccatcgactccatctccggcgggcgctttggcgttaacctggtcaccggctggcaaaagccggagtacgagcagatggggatctggccgggggacgattacttctcccgtcgctacgactacctgactgaatatgtgcaggtgctgcgcgatctgtggggcaccggcaaaagcgatttcaaaggcgacttcttcaccatgaacgactgccgcgtcagcccgcagccgtcggtgccgatgaaggtgatatgcgccgggcagagcgacgcgggaatggaattttccgcgaaatacgccgacttcaacttctgcttcggcaaaggcgttaacaccccggccgccttcgcgcccaccgcggcacgcatgaaagcggccgccgacaaaaccgggcgcgacgtgggctcctatgtgctgtttatggtgatcgccgacgaaaccgacgacgccgcgcgcgccaaatgggaacgatacaaggacggcgcggatgacgacgcgctgagctggcttaccgagcagagccagaaggatacccgctccggcgcggacaccaatgtgcgccagatggccgacccgacgtctgccgtcaatatcaacatgggcaccctggttggctcgtatgccagcgtcgccagaatgctcgacgaagtggctgnnnnnnnnnnnnnnnnnnnnnnnnnnnnnnnnnnnnnnnnnnnnnnnnnnnnnnnnnnnnnnnnnnnnnnnnnnnnnnnnnnnnnnnnnnnnnnnnnnnnnnnnnnnnnnnnnnnnnnnnnnnnnnnnnnnnnnnnnnnnnnnnnnnnnnnnnnnnnnnnnnnnnnnnnnnnnnnnnnnnnnnnnnnnnnnnnnnnnnnnnnnnnnnnnnnnnnnnnnnnnnnnnnnnnnnnnnnnnnnnnnnnnnnnnnnnnnnnnnnnnnnnnnnnnnnnnnnnnnnnnnnnnnnnnnnnnnnnnnnnnnnnnnnnnnnnnnnnnnnnnnnnnnnnnnnnnnnnnnnnnnnnnnnnnnnnnnnnnnnnnnnnnnnnnnnnnnnnnnnnnnnnnnnnnnnnnnnnnnnnnnnnnnnnnnnnnnnnnnnnnnnnnnnnnnnnnnnnnnnnnnnnnnnnnnnnnnnnnnnnnnnnnnnnnnnnnnnnnnnnnnnnnnnaggcgtgctgctgaccttcgatgattttctcaccggcgtggaaaccttcggcgagcgcattcagccgctgatgcagtgccgcgcccacatccctgccgtgacgaaggaggtggcgtaatgacgaccctcaacgctcgcccggaagcccttacctttgacgcgcagcgcagcgcgctgatcgtggtggatatgcaaaacgcctatgccagtaaaggcgggtatctggatctggccgggtttgacgtctccaccacgcagccggtgattgagaacatcaaaaccgccgtgagcgccgcgcgtgctgcgggcatgctgatcatctggttccagaacggctgggacgaccagtacgtcgaggctggcggtcccggttcccccaactttcacaaatccaacgccctgaaaaccatgcgtcaacggcccgaactccagggcacgctgctggcgaaaggcggctgggattatcagctggtggatgagctggtaccggaacccggcgatatcgtgctgccgaaaccgcgctacagcggctttttcaataccccgctcgacagcctgctgcgcagccggggcattcgtcatctggtctttacgggcatagccaccaacgtgtgcgtggagtcgaccctgcgcgacggctttttcctcgagtattttggggtggtactggaggatgccacccatcaggccgggccggattttgcccagaaagccgccctgttcaatatcgaaaccttttttggctgggtcagtaacgtcaatgatttctgcgacgcgctggatcccccgctcgcccgcatcgcctgaggagaaccgctatgccgaaatccgtgattattccgccgggcaccagcaccccgattgccccgtttgtccccggcaccctcgccgacggcgtggtgtatgtctcgggcacgctgccgtttgataaagacaacaacgtggtgtttatcgatgacccaaaggcgcaaacccgccacgtgctggagacaatcaaaaccgtgatcgaaacggcgggtgggacgatggaggacgtgaccttcaacagcatctttatcaccgactggaaaaactacgccgcgattaacgagatttacgcggagtttttccccggcgataaaccggcgcggttttgcatccagtgcgggctggtaaagcccgaagcgctggttgaaattgccaccgttgcgcacattgcgaagtgaggcggccatgaaactgtccatttcaccgcccccctttgcgggcgcgcccgtggtggtactgattgccgggctcggcggcagcggcagctactggctgccccagctcgccgtgctggggcaggagtatcaggtggtgtgctacgaccagcggggcacggggaataacccggataccctgccggaagactacaccctcgcacacatggccgacgagcttgcgctggcgttagccgaggccgggatcgcccgttactgcgtggtcggccacgcgctgggggcgctggtcggcctgcggctggccatcgataagcccgacgccctcaccgcgctggtctgcgtcaacggctggctgaccctcaatgcccatacccgccgctgttttgacgttcgcgaacgcctgctgcatgcgggcggcgcgcaggcgtgggtagaggcacagccgctgttcctctacccggcagactggatggccgcccgcgccccgcggcttgaggccgaggaggcgctggcgctggcccattttcagggcaaagccaatctgctgcgcaggctgcatgccctgaagcaggccgatttcagccgccacgctgcacgcgttcgctgccccgtacagattatctgttccaccgacgatctgctggtgccgtccgtctgctccgctgaactgcacgccgccctcccgcacgcccgcaaaacggtcatgcgccagggcgggcatgcctgcaacgtgaccgtgccggacatctttaacactctgctgctgaacgggcttgccagcctgctgcacagcccagaacccgctttgtaaggagcttgaatgagcgaagccatcacgcccgccgcgctggaaacgctgtttaccggcgcacgtacccataacggctggctggatatatcggtcagtgacgagacgctgcgcgagatttatgacctgatgaaatgggggccgacatccgccaactgctccccggcgcgcattgtgtttgtgcgaagcccggaaggaaaagagaagctgcgcccggcgctctccagcggcaaccttgagaaaacgctcactgccccggtcacggcgattgtcgcctgggacagcgagttttatgagcgcctgcctgaactgttcccgcacggcgatgccagaagctggtttaccgcaagccccgcgctggcggaagagaccgcctttcgcaacagctcaatgcaggccgcgtacctgattttcgcctgccgcgcgctcgggctggacaccgggccgatgtcgggttttgaccgggaaaaagtggacgcggcctttttcacgggcacgctactcaaaagcaatctgctgattaacatcggctatggcgatacgaccaaactgtacggacgcctgccgcgtctggcctttgacgatgcctgcgggctggcgtaaggagcgaacgtgatgacaccggataaacaaacctttcgcgacgctatggcctgcgtcggcgcagcggtcaatatcattaccaccgacggcccggcaggcctggcgggcttcaccgccagcgcggtatgcagcgtcacggattccccgcctaccctgctggtgtgcctgaaccgcggcgcgtcggtctggccgattttcagcgagaaccgcaccctgtgcgttaacacgctgagtgccggacaggagcctttatccaacctgtttggcgggaaaacgccgatggcggaccgctttgccgctgcccgctggcagacaggcgacacgggctgcccgcgtctggaaaatgcgctggcctcgttcgactgccgtatcagccaggtggtgagcgttggcactcacgacattctgttttgcgacattgtatccatcgtacgccacccggcgccgcaagggctggtgtggttcgaccgcggctatcacgcgcttatgcgacccgcctgttaatccgcattcaggagacagatcatgttcggacttccccactggcagttgaaatcgacctccacagaagaaggcgtggtcgcgccggatgaaaggctcccgctcgggcagaccatggtgatgggcgtgcagcatgcggtcgcgatgtttggtgcgacggtgctgatgcccatgctgatggggctggatcctaacctcgccattttgatgtcgggtatgggtaccctgctgttcttttttgtcaccggcgggcgtgtgcccagctatctgggctccagcgccgccttcgtgggggtggtcattgcagcgaccgggtttaacggtcagggtattaaccccaacctgagcgtggccctcggcggcattatcgcctgtgggctggtctacaccctgaccggtctggtggtgatgaaagtcggcacgcgctggatcgagcggatgatgccccccgtcgtcaccggggcggtggtgatggcgataggcctgaacctcgcgccgattgcggtgaagagcgtttccggctcaccatttgaaagctggatggcggtgataacggtgctgtgcatcggcgtggtggcggtctttacgcgcggcatgatccaacggctgctgatcctggtcgggctgattgcggcctgtctggtctacgcgctgctggcgaacgtgttcggtctcggcaaaccggttgatttcacactgattcaccaggccgcctggttcggcctgccgcagatgacctcccccacctttaacgctcaggcgatgatgctcatcgcgcctgtcgcggtgattctggtggctgaaaacctgggccacctgaaagccgtagcgggaatgaccgggtgcaatatggatccgtatatggggcgggcgtttgtgggagacggtctggcgaccatgctatccggctcggtcggcggcagcggcgtgacgacctacgcggaaaacatcggcgtgatggcagtgaccaaagtctattcgacgctggtcttcgtggcggcggcggtgatggcgatgctgctcggcttttccccaaaattcggcgcattgatccacaccatcccggcccccgtgattggcggcgcctcgattgtggtatttggtctgattgccgtggcaggggcacgtatctgggtgcagaatcatgttgatctgagccagaacggtaacctgatcatggtggcggtaacgctggtgctgggggcgggtgatttcgccctgacgctgggcgggtttacggtgggcgggattggcacggcgaccttcggcgcgatcctgctcaacgccctgctgagccgccggatggctgccgcgccgcagggcgccgtggtgactcaggatccgtgaaatcaacacgtcgggtaacggcgacgccttacccgacctgcatgttccttaagagcgatcacgcctgctcaaacagtcgttctatagattgcgtggggaagaacagcgaactgctgttttcacctgccagcgggataaaccccagcttcagataaaatcgtttggcccgttcgttaagcgcatccacaaaaattccgtggacgccaacagcctgcgaggccagataaacaacgcgcatagcgtgtgtgacaagcgttgttccccactcgtttccctggagttctttatggacagccagacgccccagcgtcacgctggggacgttgctgtatgggatgcggcgctgctgagtctttgaaggaagcatcgctttttcaaagcaacttcccgagagtgtgtaatagcccaggacacgcggatggtcgcgttctttaagcaggtagccgcgtaaaatacgcccgccgtgctgacgtaccaggtgctcggtaaggaaggcatttagcgagggttcaccacaatcgaaatcgccgaaatcgtaatcggttccctctgataacatttcgatcgtgagatttgccacgacgcttcactccatgtttcgaagacgtttcgccgctcgcttcaggcgttcatttggctctggcggattgtcgatggcatccataacggcaatccatgaggcttcgtttaatacgagacgccgatgctgttcgatgacttcggcagcacgctctgacgcactgttcaccataaactgggtgatcgtttggttggtcatcgctgccgcttcttcaatcattgttttgtcttcgtccgacaggcgaagatcgatacgctgttttttgagtgctggcatggtttcatttatcgtgtacggttttcatccgtacacatcgtagttaaacctgccctttatttcaatcaaaagcttattcggccgttaaatcgttcaccgcattccgacgctttctgagctttaactcactcaccagcacgccgagaacaataaacgccgcacctaccagcgccagcagcgtcagacgctccccggcgagtcgcccgaaaatacccgcccacaccggttcaccggtataaatgaccgtcgcccgtgtcggggatacgctgcgctgcgcccagttcatggtgacctggataatggcgctgaaaatgcccagccccagcgccacgacgataagcccggtagacatcggcgggacggactcccctgctggcaccatcgtcgcgaacgccaccagcgacgcggtggtaagctgcaccaccgtcacccgcttgacgtccacttttcctgcccaggcgctaatcagaataatttctgccgcaatggcaacggcccccaccagagtgatgatctcccccggccccagcgccagcagattattttccggcccggctaataaaataagaccgatgaacgccagcacgatgccaatgcacgacatcagccccggcattctgccgaggcacagccactgcaacagcggcaccagcggtacgtacatggcagtgatgaaggcggatttactgctggagatagactggagcccccacgtttgcaggctgtagcccatggcaatcgccacaccaatggcgacacccgccttaagctctctcagggtcaatccgcgcagggttttcagcgaaataagcgccacggcaatcgccgcggttgcaaagcgcagccctacaaagaaaaacggatcgctcatcgtgaccgcgtactgaacggcaagaaaggttccgccccagaacatggtgatcaaaatcaggatcgcttcctgaggcttaatggagaaggtaaaacgggaaacggacatgggacaccagcacgaagaattaatcctgtagtgtgcgatgcctttgatgacagttcaatgtagctgacataaaaaaaccgccgggaaacccggcggcagggcgttaacccggcgtactacttattgctgccgtggctatttttacccccttttttaccagcctctgatgcgcgctgagggtcgtttttgaagttgcccccgctagactggccacctttacgacctgcttctgatgctctttcacggtcttcagcgaaattacctgaaccaccacgatggtttgccatctctaacctccagagtgtgaaacattagacatcatattgcattcagtaaaagaggattctttcacctcgcggctcaaggacagtgcctttatctgtgccgcgtgaaactaagcttagtgtaatgcggctatccggcaagcgagaggtaatattctgtaacatgatctcagcctttcgtatgaaatatcggggaagttattcataagccattcttatattttgaaaaatccgcgccgcgaaagttgtttcattttgctacaaggcgcgtaaccaaaagatattgttatatatcaaagaaatgccgttcatttttgcagtctggctgtgatgtcatatctttaaaggaacgcagcgatccgctgtaagaaaaaccaacgaggagtgatgcaaaatggcaaaagttctggtgctctattattccatgtatggacacattgaaaccatggctcacgcagtagcagaaggcgcaaacagagtagacggcgttgaggtcgtggttaaacgcgtaccggaaaccatgcaggcggaagccttcgccaaagccggggggaaaacacaaaacgccccggtcgccaccccgcaggagctcgcggactatgatgccattatcttcggcaccccgacccgcttcggcaatatgtccggccagatgcgcaccttcctcgaccagacgggcgggctctgggcctccggcgcgttatacggcaagctggccagcgtgttcagctctaccggcacgggcggcggccaggagcagacgatcacctccacctggactactcttgcccatcatgggatggtgattgtgccgattggctacggcgcgcaggaactgttcgatgtttcccaggttcgtggcgggacaccgtatggtgcgaccaccattgccggtggcgatggttcacgtcagccaagcaatgaagaactttcaatcgcccgctatcagggtgaatacgtcgcgggtcttgccaaaaaactgaacggctaacccaacaggaggacaagtatgccaactcaagaatccaaagctcaccacgtgggcgaatgggcaagtttacgcaatacctctccggagattgccgaagccatctttgaagtcgccaattatgacgaaaagctggctgagcagatttgggaagaaggcaacgatgaagtgctggttcgcgccttcgaaaaaaccgacaaagactcgctattctggggcgagcaaaccatcgaacgtaaaaacgtctgaacgttccccccgcccgcgcgcgggggttttcttctatttcgccgcgttgttcatcaccgcattaaatttatcgactggacagaagccgttcgcatccaccggacagcccttcagctccagcgtcacgcgctgcgcaggggattgcagcgacagtacgctggcgttacgcaactgctctgaactctggtagacatactcaattttcatcagctcctgattagtgtttttgtcatgccagcgctggaagacaattttaccgccaatcggggttcgttcctgctggtcgtgcagctgataaggcctgaagtccagcgcggtcagcagcgaggcgatgttagagtcgtgccccaccagcagggtgatttttggcgcttttgcctggtcggtcaccagcgctttatcaatgtacttaaccagcggtttagccacgttctgcgccacctccgtcgacgtaaacagcgagtcctgatagccgtttttcagcttcgacagcacgcgccactgctgatcggttttgatttccccccaggccacctggtctgtcgggaagccttcgtaatactgtaacgtgaacgcatccaccagcgagttacccaccttcagcggcccggagacgcccggctctttttcataatcggcgctgaacgtatctttcgcctccgtcagggagcagactttttctccttgcaggacggcgagtcgctgtagtttgtaagctgttccagcagtttgtagctttcatccagctgcattttctgccgttccgtctccatcgctttcagcgctttctcgcgaaactcaggggagttatcggtaatgaccggattgaaggtggggtccatggtgcccattttttcctggtgatgcacaggaacatcgcacccggggaacgcgccggtgataaagaactgcgcggtcgccacggtgcgctggaggctgttggcgtaggcatagacggtatccgctggcgggcattcacccgtcttcaccatcccctgctctgccagccactcgcgcatatagtgacccatatacacttccagtacgccacctttggtggtgagctgtccacccgggacgtcccactccggccactgcttcggcgtggactgctccagcacgctgccgttattggcaagcggcgcgcgcaggttgtggcggctcatgatgagcacctgttccagcttatagccgtccggcgtgtcctgcgcctgtgcgccaaaggtcacggaaagggtacctgccacggcaactgcgagtagtgcttttctcatccctaattcctcacacgtttttaatgtcgccctgagtgtgacagatccgtgacaggtttttcgggaagcatttctcaaactgatgattaacgtgcttacggcgtgtgccgatgagttttataaaaaaaccataccccaccggagaattcgctgtgaaacgtacccgccttgaagagagcacctgccccgtcgcccgttcgctggatattatcggcgactggtggtcgctgctgattgttcgcgacgcgcgctacggggtcgcagtcgatattctggtggcctatctcaccgatgaagcggggatccgcgctacgtaaaacagtagcctaacgctgaagctggtcaccgtattcgctcatccaggcggccagcggcgagagtgcgtcctgaagggttagccccagctcggtgatctgatactccacgcgcggcgggatctccgggtagaccgttcgcgtcaccagcccgcgctgctcaaacaggcgcagctgcttcgtcagctctttctgggtgatgggggcagcggcacgcagcagatcgccaaagcgaacgggcgtattgaacacaatcaggcgatagagaatggggatcgcccacttaccggaaatcagattcacaaactgcgtcatcgggcannnnnnnnnnnnnnnnnnnnnnnnnnnnnnnnnnnnnnnnnnnnnnnnnnnnnnnnnnnnnnnnnnnnnnnnnnnnnnnnnnnnnnnnnnnnnnnnnnnnnnnnnnnnnnnnnnnnnnnnnnnnnnnnnnnnnnnnnnnnnnnnnnnnnnnnnnnnnnnnnnnnnnnnnnnnnnnnnnnnnnnnnnnnnnnnnnnnnnnnnnnnngtcatcgggcaggtatacgcctcagattttttttcgcagcacgcttccagcagctctgccatttcacacctcttgcctcgttagtatccatttggtacctggtttcctttcgatactaacgtttctatagtgctttctccagagacatttcaggagaagaacatgggtcgtttaaccgataagtatacgttgattaccggcggcaccagcggtatcggtctcgccaccgcgcaggcgtttatcgccgaaggggcgcgcgtcgccgtgaccggacgcaacccggataccctcgccgaagcagagcgcattctgggcgataaggcctgggtgatcccaaccgacgcaggcgatatttcgtcgcaaaaagcgctggcggagaccctcaccgcccgctggccacgcctggatgcggtctttctcaacgccggtgacgtaacgcacgcgccgctggaagtctggcaggaagaggcctgggaccgtctgatgaacatcaacctgaagggaccgttctttttaattcaggcgctgctgccgctgctgaataacccatcctcggtgatcctctgcggctccgtgagcgcgcgcatcggcctgcccaccagcagcgcgtatgccgcgagcaaggccgccctgctgtcgctggcgcgtacactgtcggcggagctgctgccgcgcgggatccgcgtcaacggtctgagtcccggtccggtggaaaccccggcgtttacgaaaacgggcttaagcgacgaggcgcttaacgcgatgatggcagaggtcattaagctggtgccgctgggcagaatgggctcgacgaccgagctggcaaaagccgcactctatctggcctccgacgagtcgagctacacggtgggaacggaactgctggtggacggcggaatggggagcctgtaattcaaaaggcgctgatgccggtgaccgcgccgacatacagcgccgcccacgcacaggcggaaagcaggctgacggcgtagaccttgacggcgttcagcctgagcatcccggccgccagcgggacgatgtaacgcaacaccgccaggaagcgcgacgtaaaaagcacgatgaccccgttcttttgcagctgatgctggacccgcaggaacttattggcatgctttgaggtgaagcgcgtgaccatccgggtatgccccatcagttggccgatatggtaattcagcaccgaacccgccgttgcccccatcaccacggcgagccacgtcagcgcaggatgcatgctcccctggctgacggtaatgcccgccagcagcatcaccgacgcaggcggcagcacggaggagatcagcaccgtcgatttgctcagcgccatcacgaataacagcacaaacagatgtgccggatacagcgcaaaatgattcagcaggttatcaaaccatgtcattttcacctcccccgtttataatttaattgtccatttaaaatgaataaccttaaataaaccctcaacattttattaataagatttacctaaaccgttcttaaacattatttaattttctgagcactaaatttaaacaggcgtattatccctctcgttttacaacgatctcgttatggcgaggctcctgtacaaatacacgttatcgctctggtgggttcgagagaaccggcacagggtaaaacaggcactgtcgaatcaaggctttgtcagtataacttcccttgtgggatacggtgtacagtgctgaacccaggacgtggggatctcctttccgacatgccctgtcttgctcgcccctgagagattttattattcaaagggaatttactatgtcttacgctattcataaccaaaacctggcttttaatgacagcgccatcgcgcaatatatgaataccgattttatcgttatcgatatttcattatgcgtagctctggcacgcgagcagttctttgaaaaattaaaagatgatgatattccgtcgcatatttttatcgaagataacggtcgcctcgcgggtttaatcgccgtacgcaaattattgcaggccacggacaccgtgcagcctgttaaggggttgatgatatcggattttattcagctcaaaccggaagatgagcgggcggatgtcgccgggctgctggcgcacgcgggtgcggatgtagtgccggtggtgacccacggcaagctggtgggctgccttaccgagcgtgaaatcgcccatctgctggaagatgacgttactgaagatgcccagcttcagggggcgacgctgccgctggaaaagccctatctggaaaccagcgccttcagcctgtggaagaaacgctccgtctggctgctgctgctgtttgttgcggaagcgtataccagttcggtgatccagcattttgaagaggcgctggaatctgccatcgcgctggcgttctttattccgctgctgattggcaccggcggaaacagcgggacgcagatcacctcgacgctggtgcgcgccatggcgctgggtgaagtccaccttcgcgatgtgggtcgcgtgctgcgcaaagagatcagcacctcgttaatgattgccgccacgctgggtctggcgggctgcgttcgcgcctggatgatgggtattgggatggaaatcacgctcatcgtcagcctgacgctggtctgcattacgctgtggagcgccatcgtctcgtcggtgatcccgatggtactgaaacgctgcaaaatcgatccggcggtggtctccgcaccgtttatcgccacgctaatcgacgggaccgggctgattatctacttcaaaatcgcgcagtatacgctggggctggaataacgaaaaaaccctgcgatattgctatcgcagggttttcgaatttggcggaagcgtagagattcgaactctagaaccctttcgggtcgccggttttcaagaccggtgccttcaaccgctcggccacgcttccaaagtgaggcgcactataaacatctctgagcatgatgtaaagcacgaaattgcataacgttacacgtcttgcgtcgtccccttccgccccgctgatttcttcgtcatcggctggctaaaatgtaaacatttatttttacattcataacgtttattagattcgcaggtggtcatttagactctttttcgtacaacacccattaaccgtggatcactgcgataagagattagccatgactttatttaacgacgattatgaattttttatttatcagtgataactactacctttgccagggtgtatcaagcgccctgacatcaacccatttgattcgcgatgacgcggatattcacgaccttgatggggtcgatcaggcgatggattttatcattgcgattgaacaggataagttacgcaataaaaccattcggcaggtcaaaaaagttaagcgtgattacattgtcctgatgcatgagatagaagccaaccgtgcggtgagaatcgataatattatctattcgtcgatgcattttactgctcacccttttcaacagttgatgcgcttttaccgggcgctcagaacacactcttttacgcgacgcgaatatgacgtgctgaagctgtttcatttggaaaaccatgagatcgcgaaaaagctgcaactgtcacaaaaaacgaccagcacctaccgcgtgaggatcctcgagaaattaaatatgcgctcaaaaaacattctggcgatgacccgtgtaaaatcggcgatcgtcgatcagaagctgtgacattttgccttgccacgggaaaaccgggcatcagttttcgccctgagggggtttggctggcgcggtataccagttctctttggcaaccatcacgctaccctctggctgcataacaaaattcggggacataatctgcacgttaaattcgttaaacacatcctgtatctggctatgcagttcattgcgggcaaccgcgagggactgttcgggcagcagacggacctgcaattcgtaagcgatataccagtccattaaccctaactggcgcaccagcggcggctcggaaaggtcaatcccttttgcccgtttcgcggccagctccagcatggcatgcacctgacgccacggggtgtcataaccgatcgtgacgctgatcgtcagattgaggctgccatcgggctgtagcgcgctcaggttggtgatcttaccgctcaccaccaccgcgttgggcacggtaacgacataattttcccgggtaataattttggtcgccagcatgccaatttcactgaccttgccttcgttatccgccacccgaatgacatcgcctttgcgcagcgcgcgggagtaaatcaggaccagaccgctcatggcatggttcatcacccccgccgagcccagcgttaacatcaggccgaagaagacgctaatacctttaaacgccagcgagtttgcaccgggaagaaacggccaggcggcggagagagcaaatagccagacggcaacggaaatgagcttacgggtggcccccacggtttccggatgtacgccgggaagttgcagacgaccagcctccacctgattcagcaccatcttaagaagcttcagaataaaagcggtaatgaggaaaatgatcagaacaatcgtcagccccggcaaggccgagacaatcgccagggcgatttgctgcaccacgcgaagcgtccagtctcccagcgacgtgccccacacccgcgtccacggaaacagactgaatgcccagctcagccagacgtaaaagccgataaaccccagcaggaacatcagcaaggcgtaaagccgaatctcaatggcgccaatgtaccgccgccagctttgcggcacccggctgcggttctccacaatgcgccgacggtagacgcgccggaaccagcgccaggatcgccacgcgccgtagcagagcagcaacagcgccagcaggccagcggctgtttttaccgtcgacagcgccagccagccggtatcgtattgatcgcgcagcgccatcctttgcgcttccatgcgcgccagcacgcgctgtgcggcctgattgagggtaagatcgtccccttcgtccaaatccccttccgtcagcagcatcacaggtttcccgttcatcactattagccgtccctgctggttatagcgggtcacggggacgatgctgagcggctcacgcacatccgcctcggtaaaattgcgcagggtgttgcggatgcgtaaaacgcgttcttccggcgtggtcaggccaaatttcgcctggagcatgacgatgggctgatggaagatgtagaccgttcgggcgcgctcctgctccgtaggcgcctggcggggctctgcggcatacgatgagaaggcgctcagggcggcaaaacagaacgcaaacgcgagcaggatctttttcatccttactaccccaggtcagaaatcttgttatttttcaggcaacccgcgaatgccaggtgggtatgttgagaatagtccagcctttcgtttctgcaacaagcgacggtgagcgtgttgctctcagtcacaatatatgtattatgttataacataacaattttggattgcgttctatgttacttaaaaatgggttatttctggcttcactgctcttcatggcgcctgccactttcgccgcaaccacctggcccctcacgattgaaaattgcggcgttaagcagacctttacgcaggctcctcagcgcgtcgtgaccgtgggtcagcatgaaacagaattactgctcgcactggggctggagaaaacgatcgccgcgacgtcagtctggttcggcaagctcccacccacgctggaggatgccgggaaaaacctcccccggcttgcggataattccccctcctttgaggccgtggtaggacagaaacctgaactcgttctcgcacagtatcactggcacattggtccgcagggagaagtgggaacccgtgagcagtttgcgtcgctggggattaatacgtggatctcccctgccgactgcacggataaaacggtaacggaaacctcaaacgcagacggagcacgtagcgcgccgttttcactggcggaaattacacgggaagtgacagatctggcgacgatttttgatgtttccgcgcgaggtgagcagctcaatcgtgcgctggcggagcgtattaaaaaggcccaggcgcgcgcctccgcgaaaccgcttagcgttgtattctggttctccagcagccgtctgaatggcgatccctgggtggccgggaattacggcgcgcctggctggatcagccgcacgctggggttgaagaacattattgactctcacgacgaatggcccgctgtaacgtgggaacatatagcccgatcgcagccggacgtgattgttatcgccgggatgtcccgcaggctctaccctgccgatgacgttgaggtaaaaaaagcgttcttgcgcagtgacccggtgacaaagaacatgcctgcggtcaggaacaaccacatcatcgtggtgccagcgatgtcgttaaacccttcattgcgtaacgtcgatgcggttgagcttatcagcgatcggctggcttctttccgggatgaacaatgagtcatttcgcttttgaccgccgccagcagggtttactggcagccggtgccatggcgctgccgctgatgctggtctttgccgccagtatcggtgatatgccggtgtcgtatgccagtaccgggaaagcgatcctcaacggactgggtttgacctcttatgcgttgccgcaaacggaggaaggtatcgtctggcaatatcgcatgagccgggcagtaatggccgcgtgcagcggcggcggcctggcgttgtgcgggctggtgttgcagtcgatcctgcgtaatcctctggctgagccttatctgctggggatttccgcgggcgcatcgctgggggccgtctgcgtgatgcttctcggcatcggggggagcgtgattggcgtgagcagcggtgcgtttgtcggctcgtgcgccgcctttgcgctcatcatggtgattacgaacgggatgagtgaaagcccgtcgcgcattttgctggctggcattgcgggcacccagctcttcaacgccatgaccgcgtacgtcgtcagtacgtccgccaatgccgagcagtcccgtagcgtcatgttctggctgctgggaagtctgagcggcgtgcgctggcctgacacgctgctggcgctggccgttacgcttgcgggtttactggtggtattgctcttttcacgggcgctggacaccttcaccttcggggatgaggtctccaccacgctggggatcccggttaccgccgtgcgtattgtcttattgctgacctgtgccattgttaccgcaacgctggtgagcgccacgggcgcagtggggtttgtcgggctggtcattccccatgtaacgcgcatgctatgtgggccgggccatcgtctatctatcccgctgacgtttcttatcggcgcccactttatgatcctcgccgatatcgtctcacgcacgctgattgtgcaccaggttctgcccatcggggtggtgactgcgctggtaggcgcccccgtctttgtggcgttgctttatcaaaaccgaaaggagcatccatgaatattactgtggccgggttaaccgtaacccgacaagcgcagacggtgcttaaggatatcgatctcgacctgccatccgggcagattatcggcctgttagggccaaacggctcgggcaagtcgacgctgctgcgctgtctcgccgggctgtttccacgactcagcgaacgcgtggcgcttaatggcacaacgctaggcatgatgccgctgaaaaaacgcgcgcagcacatggcatttgtcccgcaacatgctgaggtcgacggagaactgaccgttgaggacattgtcagactggggcgtacgccctaccggaaaacattccagaaaacctcgcgcgacgatgaggctgcggttgagcaggcgattggcctgatgcagttatgccgcttacgccagcggcgatggcactctttgtctggcggagagcgccagcgaagccagatagcccgcgcgctggcccagcagccgcaggtgctgttgctcgatgaaccgacaaaccacctggacattcagcaccagctggagctgatgcggctcgtttcacagctgccgcttacggtggtggttgcactgcacgatctcaatcttgcggccaattattgccagcgtctgatcctcctgaaggccgggcagatcgccgccacgggcgcgccagaagcggttctgacgccggcaaacatcgaggacacctggtgcgtaaaagctcaggtctgcaaggccgacgccgggatcacgataagctataacatggtggcatgacggaagcctggcgcaaaagcaaaaacccctgcgatattgctatcgcaggggtttcgaatttggcggaagcgtagagattcgaactctagaaccctttcgggtcgccggttttcaagaccggtgccttcaaccgctcggccacgcttcctaagtgaggcgaactataaacacctcaccgcgcgctgtaaagagtgcgcgcattcgttcgctttaaaaatagccaaaatgcgtttaatcggttgaatagacgacagattggccgttttggcagcataatatccactgcggatcgttagtgctttttgatgtacatatctttagtgtagtagtacccgagcttgtctggcgtgaagccccctacccacggtttcaccaggtgcgtgcgcacgtaatgatagaccgggatcgccggtacatcccgtcccagcagatcttctgcctgctggtagaatttaccgcgctcctccgccgttttcgatttcgccgcgttcaccagtgcccgatcgtagtccggattgctgtactgagtggtgttttggctgtccccggtacggaagttgttcaggaaggttgccgcatcgtcgtaatcggcaatccaggcgtagcgtaccgcgtcaaagttatgggtgtgcatggtatcaagcatggttttccactcctgattttgcagcttcgcctccacgccgaggttcttcttccacattgagctggcggcaatggcaatacgctggtgcgattccgaggtgttatagaggagattaaagctgagcggatggctgtcgttaaatccggcttcggccagcagctttttcgcctcggcaatgcgtttatccatcggccagctggcgtaatccgggttctggagcttgacgccgccaatatccggctggctgatcagccatgccgggcgctggccctgccctaatactttcccggcgatgatgtctttatccagcgccaggttcagcgccttgcgcacgcgggcgtcgttgaacggcggccgggtggtgttgaactgataataataggtggcaagctgcggtgaaacgtccagctcgctccccagcgttttcttcagctgagcaaactggttgatcggcaccgtgtaaacaatgtcgatttcgcccgctttgtagcggttgacgtcagcagcttcagaggaaatgggcagataggtcaccttgttgatgacggtatgttcgttatcccaatatttcgggttacgcaccgccacaatgcgttcgttaaccacccactgtgacagtttataggccccgctgctgacgaagtgctccggtttggtccacttatcaccgaaacggcctaccaggactttatcaattggcaccagagacgggtgagccagcatcgccaggaaagcggcgttaggttgcgtgagcgtaacttccagcgtggtgtcattgatggctttcaccgccagcgactcgggcgcttttttgccttctgcgatatcagtgccgttgacgatacgcatactaccgggatagctggcatacggagaggcggttttcgggtcgaccagccgnnnnnnnnnnnnnnnnnnnnnnnnnnnnnnnnnnnnnnnnnnnnnnnnnnnnnnnnnnnnnnnnnnnnnnnnnnnnnnnnnnnnnnnnnnnnnnnnnnnnnnnnnnnnnnnnnnnnnnnnnnnnnnnnnnnnnnnnnnnnnnnnnnnnnnnnnnnnnnnnnnnnnnnnnnnnnnnnnnnnnnnnnnnnnnnnnnnnnnnnnnnnnnnnnnnnnnnnnnnnnnnnnnnnnnnnnnnnnnnnnnnnnnnnnnnnnnnnnnnnnnnnnnnnnnnnnnnnnnnnnnnnnnnnnnnnnnnnnnnnnnnnnnnnnnnnnnnnnnnnnnnnnnnnnnnnnnnnnnnnnnnnnnnnnnnnnnnnnnnnnnnnnnnnnnnnnnnnnnnnnnnnnnnnnnnnnnnnnnnnnnnnnnnnnnnnnnnnnnnnnnnnnnnnnnnnnntgaattcgacatcgctttcgactttatgcgggtcgagcgaggcgggttcactgccgttgttcctgaccagttcctgcttatctgccagctgggttcctgccggcacgttagccgcccaggttgccgtgctggcgcacaggatccctgcggttaacaaagagagtgtaaagtgcgtgcgtgtttgtggtttcatttccttcgccttattgtctgtttttatgacgatccggaaataactcttagcggccttagggaaataacgcaatatttttcagtgacctataagaggttgatctgaatacgccctacaaaccgcacttcattctgagtataaaggctttgccagaataaaaaaccagtataatccctaaggggctgagtaaagatgggtaaaaccactttgcgtctgccgcgccgtttcctattctttgcgctaattacatctgtcataagagagtgactcatggatcgtataattacttcttcacgcgaccgcacatcgctactcagcacccataaggtgctgcgcaatacctatttcatgctcagcctgacgctggcgttttcggcgattaccgcgacggccagcaccgtactgatgctgccttctccgggcctgatcctcacgctggtaggtatgtacggtctgatgttcctgacctacaaaaccgcggataaaccggtgggtattctctccgcgttcgcctttaccggcttcctgggctacattctggggccaatcctgaatgcctatctgtctgccggaatgggcgacgtgattggtatggcgctgggcggtaccgcgctggtgttcttctgctgctcggcctacgtgctgaccacccgtaaggacatgtccttccttggcggtatgctgatggcaggtatcgtgattgtgctggtcggtatgctggcgaacatcttcctgcaattgcctgcgctgcatctggcaatcagcgcggtgtttatcctgatttcatccggcgcaatcctgtatgaaaccagcaacatcattcacggcggtgagacgaactatatccgcgccaccgtgagcctgtatgtgtcgctgtacaacatttttgtcagcctgctgagcatcctgggcttcgccagccgcgattaactcaccgtgctgtgaacagggccccgcttatgcggggctttgtttttttggtagacttaggcggtttttgactaacgtgtgaatgaatatgttgagttttgaaggcaaagagatcgaaaccgataacgacggttatctgaaagagagcagccagtggagcgaagcgctggcggagaaaattgcggaaaacgaaggaattaccctctccccggaacactgggaagtggtgcgcttcgtgcgagaattttaccttgaattcaacacctcgccggctatccgcatgctggtcaaagccatggcgaataaatttggcgaagagaaaggcaacagccgttatctgtatcgcctgtttccgaaaggcccggctaaacaggcgacaaaaatcgccggcctgccaaagccggtaaaatgcatttaatagcgaatactgaagttagcgtattcccggtcgggttgatgcggttccgttagcaccttatcaacccgcgcgctgcgcggtccgcccgctttcagccacgccaccagcttctcaacccgatccgcctcaccgcaggccacaacctccacgctgccatcatccatgttacgcgcataccctgtcagcccgagctgaagggcttcgcgctgggtgctgtagcggaatccgacgccctgtacaaggccatgaacccaggcaatggtgcaaacatttgacatcatccttctccttatccgactggcgcgttgcatttcctcactgaagtcgggaaaatggcggccatttcattggaatcgacagaatagcaaattatgagtgtacgtttagtgttagccaaagggcgcgagaagtcattactgcgccgtcatccctgggtcttttccggcgcggttgcccgcatggaaggtaaagccagcctcggtgaaaccatcgatattgttgaccatcaggggaaatggttagcacgcggcgcatactcgccagcatctcagatccgcgcgcgcgtctggacgttcgataaagaagaaaccatcgatatcgacttctttgtccgtcgtttgcaacaggcgcagcagtggcgcgagtggctggcaaagcgtgacgggctggacagctatcgtctgattgccggagagtccgacgggctgccgggcgtgaccattgaccgcttcggcaatttcctggtgttgcagctgctgagcgccggggcggaataccagcgtgccgcgctgattagcgccctgcaaaccctgttcccggaatgtgccatttacgaccgcagcgacgtggcggtacgtaaaaaagagggcatggagctgacgcaaggcccggtcaccggcgaactgccgcctgccctgctgcctatcgaagaacatggcatgaagctgctggtggatatccagggcggccataagaccggttattacctcgaccagcgtgatagccgtctggcaacgcgccagtacgttgccgataaacgcgtgctgaactgcttctcttataccggcggctttgcggtctctgccctgatgggcggctgtgctcaggtggtgagcgtcgacacctcacaggaagcgctggacgtggcgaagcagaacgttgagctgaataagctggatctgagcaaagcggagtttgtgcgcgacgacgtattcaaactgctgcgtaaataccgcgaccagggcgagaaatttgacgtcatcgtgatggacccgccgaagtttgttgaaaacaaaagccagctgatgggcgcctgccgtggctataaagacatcaacatgctggcgatccagctgctgaacccgggcggcgtgctgctgacgttctcctgctctggcctgatgacgacagatttattccaaaaaatcatcgccgatgccgcaatagatgcgggtcgtgatgtacaatttatagagcagttccgtcaggccgccgatcacccggtgatcgctacctacccggaagggctgtatctgaaagggtttgcctgtcgcgtcatgtaacttgaaaagagaaatattgcccgcacatagtgtgtatgtaatatttcccgggaggtgactatgattgccagcaaattcggtatcggccagcaggtccgccacaccttgcttggatatttgggtgtggtcgtggatatcgacccggagtattcccttgatgaaccgtcagcagacgatctggccgttgacgcagagcttcgcgccgcgccttggtatcatgtggttatggagggcgacgatggtcagcctgtccatacctatcttgccgaagcgcagctgagtggtgaactacaggatgagcatccggaacaacccactatggacgagcttgctcagaccatccgcaaacagttacaggcaccaagactgcgcaactgaaggtgtaaaaaagcccgtcaaacgggcttttttattttgccagccccagacggggaatatcgattgccggacagcgatccatcaccaccttcagcccggcatcgcgcgccagcacggccgcctgctcattaatcacgcccagctgcatccacagcgttttcgcgccgatggcaatcgcctcctgcgccacgccccaggccgcctctgaattacgaaaaacgtccaccatatccaccttttccggcacgtccgcgagcgtcgcatagccctgctggcccagcagcgttttccccgccaccttcggcgagaccgggatcacgtgataaccctgatccagaaggtatttcatgacccgatagcttgggcgatccggtttatcgctcgcgccgaccagcgcgatagtgcgcgtggacgtcagaatctcgacaatgtcgttctctttcatgctcttcctcctggcttttttcaaagtgtacgtcaaagcggacatctcaaccacgcatcccatacagaagtatgagggcaaaacggcagaatatgtctatatgttagtaaacgtgtttgtcgaaaacttttgatacattcttaccgggtagtttgtctacaggagtctgctatgaaaaccggcattgcctgggctatggttgcgttaatcatgccggtttgtgttttcgcaaccaccctcagactctcaaccgacattgacctgctggtgctggacgggaaaaaagtctccagctccctgctgcggggtgcagacagtatcgagctggataacggcccgcaccaggtggtttttcgggtggaaaagaccattcgcctcgccgacaacgaacagcaggtgtacatttcgcctccgctggtggtcagctttaatacccagcgtatcagccaggtcaattttcgtctcccgcgccttgagacagaaaaggagtcactggcatttgatgcctcgccgcgcattgaactggtggacggggactccatgcccatcccggtaaaactggatattctggcgctgacaaaaaggccaaagggaacagactatgaagcggacaccgagacctacaacagggccagcaggcgcgcctcgctgccccagttcgccaccatgatggcggatgacagtaccctgctttcgggcgtatcggagctggatgtactcccccctcagtcgcagacccttactgagcaacgcctcaagttctggttccagaatgccgatccggacacgcgcgcccgttttctgcaatgggcgaagcaacaaccttcgtcgtaagccacattttttcgtcctttctcttgcagcatcagccagttcccgtcatcgtgtaacgaggtaacctcacggataagattatggaactgacaacacgcacacttccggcgcgcaagcacattgctctggttgcgcacgatcactgtaaacaaatgctgcttaactgggttcgtcgccatcagcctcttttacagcatcatgccctttctgccacgggaacaaccggcaacctgatccaccgcgaaaccggtctggaagtgaatgccatgctgagcggcccgatggggggtgaccagcaggtaggtgctcagatttcagaaggtaaaattgacgttctgattttcttctgggatccgctgaacgcggttccgcatgatccggacgttaaagcgctgctgcgtctggcgacggtgtggaacattccggtagccaccaatctttcaacggcagatttcatcattgaatcgccgcagtttaacgatccggtggagattttgatcccggattatcagcgttatcttgcggagagactgaagtagttttttgcccggtggcgctgcgcttaccgggcctatagaatttgcccggcgcgttacggctttctcgccaccggcacgtcaatacttttcaaaatatcgacaaacaccgacggctcctctttgttgaacaagagccacacgcgatggcgcgcgcgggttatcgccacgtacagtaaacgccgctcctctgcatccgggaaatcttccggaacaggtaataacgcctcttccatcacggattcccgcgccggtgcagggaaaccgtcgctcccctcttttagccccaccacaatcacgtagtcggcctgctgccctttactggcgtgaatggtcataaaatcgagctgaagttttggccagcgcgtcgccgctttttccagcgccgtcggcttgaggtggtgataacgcgccagcaccagaatgcgctcatccggtttcgcatagccgctcagtttatccagcagcggttccagctgatcgtccgccagcagcgtgacggcctttttatcccccgacgtcaggctgttaagcggtttcgacagctggtgcgggttctgctgaataaaacggttggctatttcgccaatccgcgagttgaagcggtaggtggtgtccagatcgctgcgatcgccttccccaaaatagtggtggaaggccgtcgtgagggatagttgcgccccgctgaaacggtagatagcctgccagtcatcgcccacggcaaacagcgacgtgtgtttattctgcgtccgcagcgccgaaagcagcgcagcgcgctgcggcgagatatcctgaaactcatccaccagaatgtgtttccacgggctgacgaagcgccctttctccagaatgatgatggcctgatggatcagccccgaaaaatcgaccgcgttttcgtctttcagcgcggttttccacgctttcagcatcggcgccatcagcttaacccgtttagaaaacacagcgcggatcgactccggtgcgctttctatcatctccgcctgagagccgccgtgcatgcgcatcaggcttacccaccggtcgagacgagagcccagccggcgcgccagcttttcatcctgccagaagctgccctccggcacctcccagctgagttcctcttcaagccactgacgccagcctttcgcctgcgcctttttttcactgcactgctgacgccatgccttgataaacagcgcctggcgagcctgagcgtcgttctccagcttgctgacaacaggaacttttttgctgccctgttgaatgatgtgtaaagcgagggagtggaacgtgcgcgccgagatatcctgggtatgcaaacgcgcctgaatgcgctcatccatctcctgcgcagccttgcgaccaaaggccagcagcaaaatctggtctgcaaccgcctcgcccgttgtcagaagccaacccgcgcgcgccaccagcaccgacgttttgccgctcccggcacctgccagcaccaataaagactgttcgccattcaccacggcgcgcgcctgggcaggattgaggggcgatgactccactgtactgaagaagtcggcatattgcgtaagcatcgcctcagtccaggcctggttatgcgccagacggcttttctcgatatcgctcagccaggcctggcacttccgccacgcgtcgcggcagttctcaaattcctcaagccgcgccaccggtaaaggcaatgccgtcagcgcctgggcgattttttgctgaagcccggcggtttgctggcgcgtcagccacttctgctgcgtattgcttagcgcgatatcgtccagcacctgttgcagaacctgtgcggcaatcacgctcatctcctggctccactgctgccagcgcgtgttcagatgatggtggaagcgttgggtttccgcccactcggtcccgtggagtcgcaccactttgtctgccggcaggacgaactccagctccccccataccagccctcgtttacaatgaatggccagtagctgattaaacggaataaggtattcgtggcgttcaccggagactttcactcctgcattgagcaggacaatcttgtcgtaagggtgctgcgccaggcgtttgcccattgaagttgctttcagttccatatcctgccggatccacgaggtcataatttgtcagacagtttaactgccagttttaaggtgctccagcccaaaaaaacgttacaatcaccgggcgttaatcatatcgaaggaaatgagggtttatgcgtaccgttctgaatgtgttgaattttgtccttggcggttttgccaccaccctttcctggctttttgccactctggtgagcatcgtgctcatcttcacccttccgctgacgcgctcctgctgggaaatcaccaaactgtccctcgttccttatggaaatgaagccgtacacgtggatgagctggagccggaaagaaaaaatgccttcatgaataccggcggcacgctgctgaatattttatggctgatcttctttggctggtggttgtgtctgatgcatatcttcgccggtatcgcccagtgcatcacgattataggcattccggttggcatcgctaatttcaaaattgctaccatcgccctgtggccggtaggacgccgtgttgtcccggtcgaagtcgcgcaagccgcgcgtgaagccaacgcccgtcgccgttttcagtaataaggactggccgcactcatgctaagccccctgcttcgtcgctatacgtggaacagtaactggctgtataacgtcaggatctttatcgccctctgcggcaccgtcgctctgccgtggtggctaaatgacgtgaagctcaccatccccctcacgcttggggtggtggccggtgcgctggcggatctcgacgaccgcctggccggtcgtttgcgtaatctggtcatcacgctggtctgcttctttattgcttctgcctccgttgagctgcttttcccctggccctggctgtttgccttagggctgacggtgtctaccagcggcttcattttgctcggcggcctcgggcaacgctacgccactatcgcgtttggcgccctgctgattgccatttacaccatgctgggcgtctctctttacgatcagtggtatcagcaaccggtcctgctgctgttgggcgctatctggtataacctgctgaccttaaccggacatcttatttttccggttcgtgccttacaggacaacattgcccgcagttacgaacagctggcccactatctggagctgaaatcccggctgtttgatccagatattgaagaggacagccaggcgcccctgtacgatctggcgctggcaaatggtcagctggtcgccacgctgaatcagaccaaagcgtctctgctcacccgtctgcgcggcgatcgcggtcagcgcggtacccggcgtacactacactactactttgtcgcccaggatattcacgagcgcgccagctcctcgcatgtgcagtacgctgacctgcgcgagaaattccgctacagcgacgtgatgttccgtttccagcgcctgctgtcaatgcagtctcaggcctgccagcaacttgcgcgctcaatactgctgcgcacgccctatcagcacgatcctcgctttgaacgcgcattcagtcatctggatgcggccctcgatcgcgttcaggccagtgggacatcgccggaacagttcaaagccctgggattcttgctcaacaacctgagagccatcgatgctcagctcgccaccattgagtctgaacaggcgatggcaatgccgggcaatgacgccgacaaccagcttgccgacgacagtctcaacggtttcagcgatatgtggctgcgcctgagccgtcattttacgccggaatccgccctctttcgccatgcggtaaggatgtcgctggttctgtgcgtcggctacgcgtttatccagataacaggattgcaccacggttactggatcctgctgaccagcctgtttgtctgccagccgaactataacgctacccgccatcggctcgcgctgcgtattgtcgggacattagtcggggtcgccatcgggctgccggtgctctactttgtgccatccgtagaagggcaactgatcctgatcgtgattaccggtgtactgtttttcgccttccgcaatgtgcagtacgcccacgccacgatgttcatcacgctgctggtgctgctctgcttcaatctgctgggtgaaggctttgaagtggccctcccccgcgtgatcgacacgctaatcggctgcgccattgcctgggcggcggtgagctttatctggccggactggcgttttcgtaacttaccgcgcgtgtccgacagagcaatgaacgccaactgccgctatctggatgctattcttgagcaataccatcagggtcgcgataaccgtctggcctatcggattgcccgtcgcgatgcgcataacacggacgcagagctggcttccgttgtctcgaatatgtcaactgagccgcgcgccacggcagaaatccgggagacagccttccgcctgctgtgtctgaaccacacgttcaccagctatatctctacccttggcgcccaccgtgagaaactgacaaatccgggcatcctggcgctgctggacgacgccgtttgctacgttgatgatgcgcttcatcatcaacctgcggatgagccacgggttcaccaggcactggatgaactggtgcaacgtatcgcacaccttgatcctggcaccgacaacaaagctccgctggtcctacagcaaattggcctgcttatcgctttgctgccggaaatttgtcggctgcgacagaagatcgctacctggcggaatgatggccctgcgactcaggcagcgcattaaaccactccataagctcccggcgaatatccgccggtagtgccgcttcatgtaacccttcgatggcgccttcaagcgcgaacaatacccggatactcagcgctttattcttagagcgcattttcagccagctcgtcttcgcccccaactgtcgtagcgtctcttcattggtaatgcccgcctccataagcaggacctcaatctgaaaggtcagattcggcagatccttaagccggttacgctgatggcgctggtagcgctctttcctggcggcatcgagcgcaaacgaggagagctgaagcagcttttccctgttttgccacagaccttcatccacacggtagtaattaagcagcactggccgtcctcgtttcatcagggtcagaaaagaggaggcgttttttacacagtattttgcactttgctcacaggcgcgaaggtacagctcgccgtcagacaccatcgcgaacaccgcttcatccacggccagggtataaccgccaaacagggcgcgatgatgaatttcgcccagcggagagaggtattcctgagattgataaatccgatcataagatatctttttcatgataattccattaaaaatcatacagtaaacacgatatttcttactaacggatccgttagcaggaaaataggcaacttattgccgttgggcaagatgattttttcaggttcaccaggaatggatgaaatttgcgagtcgctttccgaaaatgaggttgatctttatgcacacaggggttactgtatatccatacagtaactacagggctggaatgaatatgtacacttcaggctatgcaaatcacttaacaccttccacttctgccgcaggcaatgctgcgcagaattctatcgggcgtgtatcgacagggcttatcagtgaagtggtttaccgtgaagaccagccgctgttaacacaactcttactcctgccgcttttgcagcagctcggacaacagtctcgctggcagctctggctgacgccacagcaaaaattaagtcgtgaatgggttcagtcggctggcctgccgttagcgaaggtgatgcagattaatcaactctccccttgcgatacggtcgagtcgatggtccgggcattacgtaccgggaactatagcgtcgtgattgggtggttgcctgaggatctgtcgcaagaggaacatttgcgtctgtctgaagcggctgaagaaggtaacgcgatgggtttcatcatgcggccggttcgtggagattcctatcgcagaggacaacatcccgggctaaaaattcactcaaatgtctaccattgagtcattttaagagttttccnnnnnnnnnnnnnnnnnnnnnnnnnnnnnnnnnnnnnnnnnnnnnnnnnnnnnnnnnnnnnnnnnnnnnnnnnnnnnnnnnnnnnnnnnnnnnnnnnnnnnnnnnnnnnnnnnnnnnnnnnnnnnnnnnnnnnnnnnnnnnnnnnnnnnnnnnnnnnnnnnnnnnnnnnnnnnnnnnnnnnnnnnnnnnnnnnnnnnnnnnnnnnnnnnnnnnnnnnnnnnnnnnnnnnnnnnnnnnnnnnnnnnnnnnnnnnnnnnnnnnnnnnnnnnnnnnnnnnnnnnnnnnnnnnnnnnnnnnnnnnnnnnnnnnnnnnnnnnnnnnnnnnnnnnnnnnnnnnnnnnnnnnnnnnnnnnnnnnnnnnnnnnnnnnnnnnnnnnnnnnnnnnnnnnnnnnnnnnnnnnnnnnnnnnnnnnnnnnnnnnnnnnnnnnnnnnnnnnnnnnnnntttaagagttttcctggaatttttttcgaccgcagtatgtaaaaaaagttcaacgcgccaaaactgcggcaaggcttgtctgacgcggttctcgttaattttactgcacaaaattcgttcaaaaattgttaaatattaggtatacggaactttttttttcatatgcctgacggacttcacacttgtaagttttcagctacgttgtagactttacatcgccaggggtgctcggcctaagccgaagatatcggtaggtttatatttgaccacgccccccggtgaaggatttaaccgtgattcctccgatggagatattcatggcaaattttggatgataacgaggcgcaaaaaatgaaaaagacagctatcgcgattgcagtggcactggctggcttcgctaccgtagcgcaggccgctccgaaagataatacctggtatgcaggtggtaaactgggttggtctcagttccatgacaccggttggtacgacagcgcaaacaacaatgatggcccaactcatgagagccagcttggtgcaggtgcgttcggtggctatcaggttaacccgtatgttggctttgaaatgggttacgactggttaggtcgtatgccttacaaaggcgacaacgtaaatggcgctttcaaagctcaaggcgtacagctgaccgctaaactgggttacccagtaactgacgacctggacgtgtacacccgtctgggcggcatggtatggcgtgcagactccagcaacagccgtgctggtgacgaccacgacactggtgtttccccagtattcgctggtggtgttgagtgggcaatgacccgtgacatcgctacccgtctggaataccagtgggttaacaacatcggtgacggtgctaccgttggcgttcgtccagacaacggcatgctgagcgttggtgtttcttaccgtttcggtcagcaggaagatgcgccagtcgtagctccagctccggctccagctccagaagtacagaccaagcacttcactctgaagtctgacgttctgttcaacttcaacaaagctaccctgaaaccagaaggtcagcaggcactggatcagctgtacacccagctgagcaacctggatcctaaagacggttctgtagtggttctgggcttcaccgaccgtatcggttctgacgcttacaaccagggtctgtctgagaaacgtgctcagtctgtagttgattacctggtatctaaaggtatcccagctaacaagatctccccacgtggtatgggcgaatctaacccagttaccggttctacctgtgacaacgtgaaaccacgcgctgcactgatcgactgcctggcaccagatcgtcgcgtagagatcgaagttaaaggtatcaaagacgttgtaacacagcctgcggcataagttatcgtcttataaaaaaaccccgcgatgcggggttttttattatctgaagaaaagtaaaaagcttattttttacctaacagtgcctgtagatcgttcttcagcgtcgacatctggctggcatacttctctttgtgctcggcatcttcaatcagctgcaccaccgtttccgacagggtttttccgcgccgctgcgcaagcccggccagacgctgccagaccatgaactccaggtcgatcgatttcttacgggtgtgctgatgctcggcattgaaatgccgtttacgacgagcacggatagtttgcttcatccggtttaacaaggccggattaatgtgtttctcaatccagccgttgacctgtaccggttcgttttcgagggtcagcaacatatccacagcttcttgtgccgcgctggcttcgatgtagcaggtgatcagctccccttcacggtgctttttgaccaggtacttccatttccagccgctttcgaggttttccagttgttgatatttcattgcgatctcagtgttaccgtgtaactctgttcagaatatcagttttttggcaatctgctgaaaagaaatcatatcctgtgaaacgccgcaggcgatccgcatgacgaaaacccgaatcctgattgggcagagtgcgccgcttacggtatactccacggttttacttctgactaaaaaaacatcaactttgaccattacgaaacttgcatggcgtgacctggttccggataccgagagctatcaggagctgtttgcacagccagacctcacaaaagaacacgaattcatacttagcgatacacaaccgcgtttgcattacgcgctggagcagatgtcatccccatgggctacatctcctttcatgctgctcaaagccccggaagaagccgagtatctgacgcttctcggtgatgccatgcgccagttgcatccaaaaacgaatgccgtttttggtggtcagtaccatattgccggacgtgacgtgaccttcgaacctgccacacaggcagacggactgttcgctgcaaaaggcgaagtgatcaccgccaactgggtggaagcagaacagctgttcggctgccttcgtcagttcaatggcgatgtgtcactgcaacccggtctggtacaccgcgcgaacggtggtgtgttgctcatctcccttcgcaccctgcttgcacagcctctgctgtggatgcgcctgaaaacggtggtgtcgcagcaacgttttgactgggtaggctacgatgattcacgtccgctgcctgtttccattccgtctatgccgctgtcgctgaccgtcgtgctgacgggtgaccgtgaatctctggctgatttccaggaaatggagccagaactcgcggagcaggcggtttacagtgaatttgaagacaatattcagatcgccgatgccgatgacatggcgcagtggtgtcagtgggttatggctgtggcggaacgtttcgcgctgccctcgcctgccgaggatgcgtggccgggcttaatccgcgaggccgtacgctacactggcgatcaggaaactctgccgctctgcccgctctggatcggtaaacagctccgtgaagtgggcgttatcagcggcaacggtccgtttaccggtgagcagcttagccagatgctggcccagcgtgaatggcgtgaaggttatcttgctgaccgtatgcaggatgaaattctgctggaacagattctggtggagaccgaaggcgaacgtatcgggcaaatcaatgccttatccgtcatcgagttccccggacacccgcgcgcctttggcgagccttcccgtatcagctgtgtcgtgcacattggtgacggcgaatttaccgatatcgaacgcaaggccgagctgggcggaaacattcatgccaaaggcatgatgatcatgcaggcattcctgatgtctgaacttcagctggagcagcagatccccttctctgcctcgttgacctttgagcagtcctacagtgaagtcgatggcgacagcgcctcgatggcagagctgtgcgccgtgatcagcgcgcttgcagacgtaccgattaatcagaatattgcgattaccggttccgtagatcagtttggtcgtgctcaaccggtgggtggactgaatgagaaaatcgaaggcttcttcgctatctgccagcagcgcggtttaaacggcaaacagggcgtgattattccggcgcctaacgctcgccatttgagcctgagccaggcgattctggatgcggtagagcaggaacaattcgccgtctgggccatcgaaggggttgaggatgcactacccttactgacaaacctggtctgggacggcgaaggccagacaaccctgatgcagaccattcaggaacgtatagctcaggcgacacagcaggatgctcgtcatcgttatccgtggccgttacgctggttaagttggtttagtgctaactgatcggacttgttcagcgtacacgtgttagctatcctgcgtccttcactaaaataaggcttactgagaacatggtagataaacgcgaatcctatactaaagaagaccttcttgcctctggtcgcggtgaactgtttggtgcgaaaggcccgcagttaccagccccaaatatgctgatgatggaccgtgtcgtgaaaatgaccgaaaccggcggcaactttgataagggttacgtagaagcagaactcgatatcaacccggacctgtggttcttcggttgccactttattggcgatccggtaatgcctggctgcctgggcctcgatgccatgtggcagctggttggcttctatctgggctggcttggcggtgaaggtaaaggccgtgcgctgggcgtaggcgaagtgaaattcaccggtcagnnnnnnnnnnnnnnnnnnnnnnnnnnnnnnnnnnnnnnnnnnnnnnnnnnnnnnnnnnnnnnnnnnnnnnnnnnnnnnnnnnnnnnnnnnnnnnnnnnnnnnnnnnnnnnnnnnnnnnnnnnnnnnnnnnnnnnnnnnnnnnnnnnnnnnnnnnnnnnnnnnnnnnnnnnnnnnnnnnnnnnnnnnnnnnnnnnnnnnnnnnnnnnnnnnnnnnnnnnnnnnnnnnnnnnnnnnnnnnnnnnnnnnnnnnnnnnnnnnnnnnnnnnnnnnnnnnnnnnnnnnnnnnnnnnnnnnnnagaaagtcacctaccgtatccatttcaaacgcatcgttaaccgccgcctgattatgggcctggcggacggtgaagtgctggtagatggtcgtcttatctataccgcgaacgacctgaaagtgggtctgttccaggatacctccgctttctgataacggcttttagccccttccagaaaggcgaaacctccgcattgcggaggtttctttttaaagagacggtatcaagcaagtactgccctgtctccgatggcttctcgccagccccctagccattgggacctttgattcagggcctgatagggacacatttcttttgaacgtccggcgatgccagcctgataaccacgttgatgagccctttccaggcgatctcgtttctgtctcttcatgcctcgtttccctcattcttttgtctggtggaaagaaaacagtgattgcaatatgtgcaagcacagttaacgaataccccgaatcggcgtcagcgtcaacgttcaaaattcatacgggtgtcatatttgtgagctacatggaagatcgtttgtacaaaaaatgtgacgcgggacaagtaacaaactgaacataaaacgaaaaaaaagccgcaatcagcaagaagctgagtgcggctttcgtcgatgaattttacttatggcagccgggaaatctctcttgcgatagcagccgactcctgtgcccacccctgcgcaagcactttcaccatttcgtcatagccatctttctgctgcttcagttccagatggaaaggacgcttaatcagctggccctgatgattcaagagccactccccgctgataacaaccgcaccatcatagcggccatggaatcccgtcacgttaacattcagggtatcctgatcgcttcccagaggctgcgaggcgactacccaaccagggagctggctgctcagattcgccaccagcgtattgcgtagctgctgatccagcgggctggcccacaggttattgttggcgataacgtactgcacatcgctggtctggtagaccaccccgttgcccgccagataatctggcacggcaacctgttcaacccacagcagacggctgccctgcgagctgctactctgcgcaccggattgcgcgcttaacggcaactggtagtagcttttgttatcgcttccagagctacaggccgttaataccagtgcgcctgcgatgattagccattttttcattgtttcgccctcttaggctcaggatcctttttgtctttcgcttcaaacaccagcgcgttgctcttttcattgagcgttttcagaacgggctgtagctcgcgtaaaacctgatcaagacgttgcatatccgccaccatcttgttgtaagccgctgagcccggctggaagccctgcatactgcgattcagttcgcgcaacgttttctgcatatcctgcggcagctgctgcatggactggttggcggtgatcttgttgatattatccagcgtggtttgcagacgttgcatcgtcgcctggctctgatgcagtgatcccgtcgcggcctcaagcattggattcagcggcagattgttgatcttatccagtgtttccatcaggcgctgttgaatctgcgccaggccactgctgaccgtaggaatgattttgtagccgccaaattcacggatccccgtcattggtggcgcttttggatagaagtccatatcgacatataacgcccctgtgaccaggttgccagttttcagcgagccgcgcagaccgcgattcatcagatcgctgatatgctccccaatatcctggtcctcgcctatctggttaatcaaacgctcaggctcaatgcggatcagcaccggaatacgataatcatcatcaagcatctgcttgagtcccggaacaaagtaaggcacttgtcccacggtccccagacggataccccggaactcaactggcgccccaggctgcaagccgcgtacagagtccttaaagaacatcaggtagtcgatgtgatcggtatagagcgcatcctgaatgcttttttgatcgtcaaacagcctgaaggcggttttctccgccaccggttgtcccagatcgataccttccggcacatcaaaactgacgcccccaccaaacagcgtggtgagtgaacccatctcaacgcgcatccccgcagaggtcagatccaccgcgatcccgctgtctttccagaagcgaacgttgctggtcaccaggcggtcattaggcgcattgataaaaagctgatagctgatggtccgtttttgcggatcgaaggtgcttgtttcaaccgaaccgacgcgatatccacggaacagtaccggatcgcccggcgagagctggcccgcttttttgctgtccagaataacgcggatcccttttgcatccggtggcgcaagcggcggtgaatccagcagctgatagtttgctggctgggcgcctttgttgccgggctggagttcgatgtaggcccctgacaatagcgttcctaagccgctgatcccttctctcccgacctgcggtttcactacccaaaaaacagaatcttcatggagcagtttttccatgccggcattcaggcgggccttgatttcaacatgggttaaatcatccgtcagggtcgcgctttccacgacacccacatccacgctgcggctcttgatggtggtttttccgccctcaatcccctctgcattggtggtaattagcgtgacttccggtccctgatggctgtaatgataaaacaggatccatgcaccgatcagcgcggtcacgatagggaaaatccacaccggcgaccagtttctgaccttctgcactttagcctctccactcttattttccatgctcttactcttcctcatggcttgaatcgggctcacgatcccacgataaacgagggtcgaaggtcatggccgcaaacatggtcataatgacgaccaacgcaaacatcagcgcccccatagcgggataaatactcatcagcccccccatacgcaccagcgctgagagaaccgcaatcacgaacacgtcaatcatcgaccagcggccaacaaattccacgacctcataaatcagatgcatacgctcgctgtctcgcttaccgtgcccttttgcatcccagcaaagccaggcaatggcaatcatctttaaggtcggaaccataatactggcgaggaatatgacgcctgccacagggtatgacccctcgctccacagcaaaatcaccccggccagtatggtcgagggcattctgtcgccgaacagatcggtgatcatgatcggcaagatattggcgggcagatagagcatgacagaggtcaccagcagcgccatggtccattgcaggctatttttacgccggacgtgaccttttgtttcacagcgcgggcacacctcgacatccgcgggcagcacggcggtgcagcacgagcaggagcgaagcccctgacggatacccggtacgcccacctttaccgtctgcgagagcgtaggcgccggggcaatatcgtcccaggcccagcgtcggtccacgcactggaacgcgcgcagttgtagcacgcagtacagacaccacggaataaagctgctgccaatccccacatcgccgtaggccatcagcttcacgaagctgaccaggatacccgcgagaaaaatttccgccatcccccagcttttcaactggaacaggatccgcgcgagtttgattttaaggacagtgggcatcctgacgcggttgaccagcagcagaatgacgaccaggcaaaaagccgggacgatctgcacgaaaagaagaaagaaggtgccaaggctggcgtaatcttccgagaacatcacgcctggtatttccagtaaatccacctggctggtcatcccgcccactttcatatagatgaaagggaagagattggagagcagtaacatgaataaggctgccagcgcataagccgtaggacgctgccttggcgcgtcccactcggtcgtcagcgtagcgccgcagcgcgggcaggcagccttatgtccgtgaccaagctctggcaacgccacgagcatatcgcattgcgagcataatatatgccgatcggcatggtgctggtcacacatagattatccctgtttatgcgccgtttttcagagactcaaggtactcccagcgctcaaatgcctcttccagcgcctgttcagcctgggagagttcagccaatactttctgagtatagtcgtgaggctgcgtaaagaatgacgcatcagcgacctggatttgcagtgcttccagtgcagcctccagctcttccagacgctgcggcagcccttccagctcgcgctgcaagttataactcattttagcaggagactttttgacagtttctgcctttgcaacaacaggttcagcgacatttttggtcttcgcctgtttttgcgccagcgactgcgattgctgtccacgcgcgtcatgatagccgcccacatattgcccgatgcgtccttcgccttcgaagatccagcactcggtcacggtgttatcgacaaactgacgatcgtggctgaccagcatcacggttccctgataaccatcaatcaactcttccagcagttccagcgtttcgacatccagatcgttagtcggttcatcgagaatcaataagttactgggtttcaggaacagacgcgccagcaaaagacggttacgttctcccccggacagcgcgcgcaccggcgtcatagcgcgtttcgggtggaacaggaagtcctgaaggtagcccagcacgtgacgcggcttgccattaaccatgacctcctgtttaccctcggcgaggttatccatcaccgtacggtctggatccagctcggcgcggtgctggtcgaagtacgccacttccagtttggtaccgcagtggatacgaccgctgtcggcctggagctgaccgagcatcagtttcagcagtgtggttttaccgcacccgttcgggccgatcagcgcaattttgtcgccgcgctgaacctgagcggagaaatcgttcaccagcactttgccgtcaaccgaataattcacgttctccatttcgaagacaatcttgcccgagcgggacgcctcttccacctgcatttggcgctacccatgacttcgcggcgttcgctacgttcgcggcgcannnnnnnnnnnnnnnnnnnnnnnnnnnnnnnnnnnnnnnnnnnnnnnnnnnnnnnnnnnnnnnnnnnnnnnnnnnnnnnnnnnnnnnnnnnnnnnnnnnnnnnnnnnnnnnnnnnnnnnnnnnnnnnnnnnnnnnnnnnnnnnnnnnnnnnnnnnnnnnnnnnnnnnnnnnnnnnnnnnnnnnnnnnnnnnnnnnnnnnnnnnnnnnnnnnnnnnnnnnnnnnnnnnnnnnnnnnnnnnnnnnnnnnnnnnnnnnnnnnnnnnnnnnnnnnnnnnnnnnnnnnnnnnnnnnnnnnnnnnnnnnnnnnnnnnnnnnnnnnnnnnnnnnnnnnnnnnnnnnnnnnnnnnnnnnnnnnnnnnnnnnnnnnnnnnnnnnnnnnnnnnnnnnnnnnnnnnnnnnnnnnnnnnggccttcgttacgggtacgacgcgctttaatgccctgacggatccatacctcttcctgggccagcttgcggtcgaactcggcgttttgcagctcttccacgcgcaggttttcttctttctccagcagataggtatcgtaatcgcccggataggtcaccagcttgccgcgatcgagatcgacaatgcgcgtggccatgttgcggatgaacgaacggtcgtgggagatgaagataatggtaccgttaaaggttttcaggaacccttccagccagtcaatcgcttcgatatccaggtggttcgtcggttcgtccagcagcagcaccttaggcccgctcaccagggcacgacccagcgccgctttacgcagccagccgccggagagcgccgacagctccatatccgcttccaggccaagctgggccagcacttcgttaatgcggttttccagctgccacaggccgtggtgatcgagcatctcctgcacttttgccagctcgttgagattcttgtcgctcgggtccgtcatcaccagatgcgaaatctcgtggtaacgcttgaggtattccgcctgctctgaaatcccttcggccacaaaatcgtatacgctgccggtgacgttacgcggcggatcctgttgcagacgagagacgatcagatcctgctcgtaaacaatacggccgtcatccagcccctgctcacggttgaggattttcatcagcgtcgatttacctgcgccgttacggcccaccagacagacgcgctcgttatcttcgatatgcagctctgcattatcgagaagcggtgagtcgctgaaagagagccacgcgccgtgcatactaattaaagacatttatttttcctttcagaccgcggagatcagccagcagttgtggatttgacggttacgggcaaagtcctgagacagcgttttttggctgatttcttgtgctttcagtcccagttcggccaggccgtcgtgatccatgcggaatccgcgcttgttattcgagaacataatggtgccgcctttacgcagcagacgcttcaggtcggtcatcaggcgcaggtgatcgcgttgaacgtcaaagctatcctccatacgcttggagttagagaaggtcggcggatcgataaagatcaggtcaaactgctcgtcggtatcgcgcagccagcccagcacgtcggcctgtaacaggcgatgctgacggccggttaagccgttaagacgcaggttgcgctctgcccactccagataagtccgggacatatctaccgtggtggtgctacgcgcgccgccaagccccgcatgaacgctggcgctgccggtataggagaacaggttcaggaagtctttccccttgctcatctggcccagcatgcggcgggcgatacggtgatcgaggaacaggccggtatcaaggtagtcggtcaggttaacccacaggcgcgcgttatattcgcccacttcgaggaagtcgcctttctcgcccatcttctgatactgatttttacctttctgacgctcacgggttttcagcaccagcttgtttggcgaaatgccaagtacggcgatggtggccgcaatcacatccagcatacgctgacgcgctttttgtgcatcgatagttttcggcggggcgtattcctgaaccaccacccagtccgcatagcggtcaaccgccacgttgtactcgggcaggtcagcgtcgtacaggcgataacattcgatgccttcttgcttcgcccacttctcaaatttcttcaggtttttgcgcaggcggttggcgtaatcttccgccacgcctgacggtttgctatccgccgctacctctgccagatggtagtttttctgcacgcagtccagcgggccgtttttcgctttgaactggcgatcggcacgcaattgcaggcagctcagcagctccggcgaggcgctaaacagggagaggttccagccgccgaaatgcgctttcatgttgcggcccagcaggctgtgcagtgcaatcagcgccggctcgctgtccagacgctcaccatacggcgggttgctgatcaccgtaccgtacgggccttttggcagaggattggtcagattcgccacgtccttcacctcgaaggtcaccagctcgccgataccggcacgacgggcgttgctgcgcgcgcgttcaatcacccgtgcgtcgctgtccgaaccgtaaaagtgagaggtgtactccgccagccctttacgggcgcgggtctgcgcatcgtctttgacctctttccagatggcttcatcgtgctgcgcccagcctttgaagccccagtggccgcggtgcagccctggcgcacggtcggtggccagcatcgcggcttcaatcagcagcgtaccggaaccgcacatcggatcgagcagcggcgtacctggctgccatccggagcgcatcacgatagcggcagccagcgtttctttgatcggcgccatcccggtgcgatcgcgatagccgcgcagatgcaggcctgcgccactcagatccagggaaatactggccgtatcgccgttcagccagacgttgatacgcagatccgggttttcacggtcaacgttcggacgttctttattgcgacgcgtgaagcagtccacaatggcatccttaacgcgcagggcaccatactggctgttgcggatctcatcgttgacgccgttgaaatgcaccgcaaaggtagcgtccggggtgaagatctctgtccagtcgatcatctgtacgccggtgtagagatcaagatcgctgtagaccttgcactctttcatcggcagcatgatgcgcgacgccagacggctccacatcaggctctggtaaataagccgcgtgtcgccctcaaaatggacaccaccctgaaccacccggcactctttcgcgcccagggcttccagttcagtttttaacagctcttccagcccacgggccgtactggcaaacagagaattcatatcgtcacttttactcatagaaaattgtcgcgcattatagctaatatggcgtgtatgtcataaagttgaaggcttattttctttagcgggagtgtgcagtggcgacgttatccaggctttttattcatccggtgaaatccatgcgcggcatcggcgtctctcacgcgctggccgatatgagcggattcgccttcgatcgtatttttatggtcaccgagcctgacggtacgtttatcaccgcacgtcagttcccgcagatggttcgctttaccccttccccgcttcatgacgggctgcatttgaccgcgccggacggttcaagcgtcgtgatccgctttgctgattttgcgccgcttgatgcgccaacggaagtgtggggcaatcattttaccgcgcgtatcgcgccggataacattaaccagtggctgagcggctttttctcccgtgacgttcagctgcgctgggttgggcctgcgctgacccgtcgcgtgaagcgccacgatgcggttcctctctccttcgcggatggttttcccttcctgctgaccagcgaggcctcgctgcgtgatttacaaaatcgttgcaaagccagcgtgcagatggagcagtttcgcccgaatctggtggtgaccggagcggatgcctgggatgaagatacctggaaagtgatccgcatcggcagcgttatttttgatgtcgtgaagccatgcagccgctgtatttttaccaccgtcagcccggagaaaggccagaaacacccttccggcgaaccgctgaaaaccttgcagtcatttcgtaccgcgcaggataacggcgatgtcgacttcggccagaacctgatcccccgctccagcggcgtgatccgcgtgggcgacgaggtcgaaattctcacccgcgggcctgccagggtgtacggcgcaggtcaggaagaagagatggttgacgttgtcaccaacgtcgcttccgcggtggatattcactgggaaggcaaagttatccgtggtaacaatcagcaggtgctactggaacagctggagcaggcaggtatccgcgtaccgtattcctgtcgcgcggggatttgcggatgctgtcgcattaaactggtcgatggtgaagtaagtgccctgaagaaatctgcgattggcagtgacggcacgatcctgtgctgtagctgtgtcccgaaaacatccgtacagctggaagcttaaactgcctgttcaaggctgaaggaatcaacgcgcagctgtggcttcagcctgtcattcatcactttgatggcatcacctaactgcataactcgcccggcaatggtcacgccgggttgggccagcaaacagagcgcagcgttttcaccgggttcaaccaccagcaaattcacctcttcttcggtatcgctcagattgacgctcgccgcatcgccgatagccggggtccagcacatgccgtgggcgagaaaatgccagcttttcggcatttgcggtttcaggaaacggatcgccaccagcgcatttagtaccagttcagcgcgctgttctttggagagatcgaactcgcggcatttttcttcaaaagagaaatagagtgcagcgtcgtcaacgcaaaagcctgagggagcaaacgcgtctggcgttaacattcggcgcgcaaaacgagagcgaaacaacatgccattggctaagtcgagcatcatacggtcatgctcgtcacaaaaataccagcgccagttatcgtcaggtttaattcgcatgtttctctcccgtcccctaaacgtcctgtactaaaaatgtcctgtttgccgcttcgcttataacactagtaataaaagactataatgtttaaataagcaacaatgacggaatataaaacaaccagggctggaaataaagccctggttgtctgattaagagaaaagattagatatgcgtgacgatttctttaatcagcggcggccctttaaaaataaagccggaataaatttgcaccagcgatgcacctgccgccatcttctcacgtgcagcgatgacagagtcaatgccacccacgccaataatcggcagctgaccttttaattctgcggagagtgcgcgaataatttcggtgctttttaattgtaccggacggccacttaatccacccgcttcgtcacagtttttcattccctgaacgagagagcgatcgagtgttgtattggttgcaatcacaccatcaatattatggcgaactaaactgtcggcaacctggatcaattcttctgccgaaagatccggggcgatcttaaccgcgaccggaacatatttatggtggatcgcctgtagcgccgtttgtttatttttaatggcgctaagaagatcgtcgagcgcttcgccatattgtaatgaacgcagccctggggtgttaggcgaagatatattcaccgcaatataaccggcataggcatagactttttccatacaaatcagatagtcatctttaccctgctcgaccggcgtgtctttatttttgccaatattaatacccagcacgccatcaaaatgggctttcttaacgttctcaaccagatgatcgacgccaaggttattaaagcccatgcggttgatcagcccctcggcttcaaccaggcgaaacagacgtggcttgtcatttcccggctgcggacgcggcgtcaccgtcccgatttcgatcgagccaaagcccatcgcaccgagtgcatcaatgcattcgccatttttgtccagaccggccgccaggcccagtggatttttgaaagtcaggcccatgcactgaactggtttttccggcacgttttgacgcaccagcgcggccagaggcgttcctgtaatacggcgtaactgctgaaatgtaaattcatgagcgcgctcaggatcgagctggaaaagggctttacgaacgaaggggtagtacatgaactctcctggattcccggtgtgcaaaccgggaggggattatgtgcgatcccgcccggaaagggaattgacctgtggcaaaaaaaccacgtaaaacgcaatcgtttacttattggttcgcttcttatgcatttttctgcattcatcctgaggataaatcatttagtggaataaccacgcaatgtcacactcctgaaaattgttatgaatgttagataaaagcaaacaattagttataaggagcaaccatgcgcgtcattaccctggccggaagcccccgcttcccctctcgctccagcgcactgctggaatacgctcgcgaaaagcttaatgctctggatgtcgaagtgtgtcactggaatttgcacaatttcgcgcctgaagatctgctctacgcccgtttcgacagcccggcgctgaaaaccctgatcgaacaacttaagagtgctgacgggctggtcgtcgcgacaccgatttataaagcctctttttccggcgcactgaaaacgctgctcgatctgctgcccgaacgcgcgctggacggtaaggtcgtcctgccgctggccacaggcggtacggtagctcatttactggcggtggattatgccctcaagccggttctgaacgcgctgaaagcgcaggagatcctgcatggcgtcttcgctgacgactcacaggtaatcgactaccagcataaaccccatttcacgccgaatctgcaaacccgcctcgacagtgcgctcgaaaccttctggcacgccctgaaccgtcgggatcgccacgcggcagcatttcatcaatcacaaggagtggcgcatgtttaaaacaattacccgtatcgggctggcaggtctgctggcagtggcgtcgctggctcaggcggcggagaaagcgccggagagcctgcgtatcggttatcagaaaggcagcgtcagcatggtgttggcgaaaagccatgcgttgcttgagaagcgtttcccggagaccaaattctcatgggtcgagttccctgccggaccacagatgctggaggcgctgaacgtcgggagtattgatttaggcagcaccggcgatatcccgccgatctttgcgcaggctgccggggcggatctggtttacgttggcgttgagcccgccaagccgaaggcagaggttattttggtgccggaaaacagcgagatcaaaagcgtcgccgacctcaaaggccataaggttgctttccagaaaggttcaagctcgcacaacctgctgctgcgcgcgttgcaggaggccggccttaaattcaccgatatccagcccgtttacctgacgcctgccgatgcgcgcgcggcgtttcagcaaaaaaatgttgatgcctgggctatctgggatccgtactactccgccgcactgttgcagggcggtgtgcgggtgctgaaagacggcaccaccctgaagcaaaccggttcgttctacctggcggcacgtccttacgctgagaaaaatggcgcatttattcagcaggtgctggataccttctctcaggccgatgcgctgacccaaagccagcgtcagcagagcatcacgctgctggcaaaaaccatgggcctgcctgaaccggtgatcgccacctatcttgaccaccgtcctcccaccaccatagcaccgattgacgcccacgttgccgctctccagcagcaaacggcagacctcttttatcaaaaccgcctggttccaaagcaggtgaatattcgcgaacgcatctggcaacccgctggcattgaaggaaaaaaatcatgagtctgaatcttttctggtttttacccacccacggtgatggacactatcttggcacagaagaaggcgcccgcccggtcgatcacggctatctacagcagatcgcccaggcggcagaccgcatcggttttaccggggtactgatcccgacgggccgctcgtgtgaggatgcgtggctggttgccgcgtcaatgatccccgtcacccagcgtctgaaattcctggtagccttgcgcccgagcgtggtgtcgcccaccgtcgcggcgcgtcaggcggcaacgctggacaggctttccaacggccgtgcgctgttcaacctggtgacgggcagcgatccgcaggagctggcgggcgatggcgtctttctcgatcataccgagcgctatgaagcctccgcagagttcacccgcgtctggcgacgtctgctggaaggggaaaccgtcaccttcgaagggaaacatatccacgttcgcaatgcgcaactctacttcccgccggtacagcagccgcgccctcctctctatttcggcggatcgtcggacgtggcgcaggagctggcggctgagcaggtcgatctctatctgacctggggcgagccannnnnnnnnnnnnnnnnnnnnnnnnnnnnnnnnnnnnnnnnnnnnnnnnnnnnnnnnnnnnnnnnnnnnnnnnnnnnnnnnnnnnnnnnnnnnnnnnnnnnnnnnnnnnnnnnnnnnnnnnnnnnnnnnnnnnnnnnnnnnnnnnnnnnnnnnnnnnnnnnnnnnnnnnnnnnnnnnnnnnnnnnnnnnnnnnnnnnnnnnnnnnnnnnnnnnnnnnnnnnnnnnnnnnnnnnnnnnnnnnnnnnnnnnnnnnnnnnnnnnnnnnnnnnnnnnnnnnnnnnnnnnnnnnnnnnnnnnnnnnnnnnnnnnnnnnnnnnnnnnnnnnnnnnnnnnnnnnnnnnnnnnnnnnnnnnnnnnnnnnnnnnnnnnnnnnnnnnnnnnnnnnnnnnnnnnnnnnnnnnnnnnnnnnnnnnnnnnnnnnnnnnnnnnnnnnnnnnnnngagctggtgaaagagaaaattgctcaggtacgcgctaaagccgcagaacatggccgtacggtacgcttcggcattcgcctgcacgtgatcgtccgcgaaaccaacgacgaggcctggcaagccgccgaccgtctgctcgctcatctggacgacgacactatcgctaaagcacaggcagcgtttgccaaaaccgactccgtgggccagcatcggatggcctccctgcacaacggcaagcgtgaaaatcttgagatcagcccgaacctgtgggccggggtaggtctggtgcgcggcggtgccggcacggcactggtcggcgacggtccaaccgtagcggcacgcattaatgaatacgcggcgctggggatcgacagctttatcctgtctggctacccacatctggaggaggcgtacaaggtgggtgaactgctgttcccgcatctggatgtcgctatcccggaaattccgcagccacgtcagcttcagttgcagggcgaagccgtggcgaacgcgtttatcccgagaaaagtcgcgcaaagctaaggagccaccatgtctgcaaccgcacaaaaatggctgctgcgcgccgcgccgtggtttctgcccgtcggcattgtcctcgtctggcaactggcgtcttcaactggctggctgtcgagccgcattttgccctctccggagggcgttgtggaagcgttctggtcgctaagcgccagcggtgagctgtggcaacatcttgccatcagctcctggcgcgcggtaattggcttttcgattggcggaagcatcggcctgacgctggggctgatcagcggcctgtcacgctggggtgagcggctactggatacctccgttcagatgctgcgcaacgtgccgcatctggcgcttattccgctggttatcctgtggtttggcattgatgagagcgccaaaattttcctcgtggcgctgggaacgttattcccgatttatatcaatacctggcatgggatccgtaatatcgatcgcggtctggtggagatggcccgcagctatggcctgtcaggttttgccctgtttacccatgtgatcctgccgggcgccctgccctccattatggttggggtgcgttttgcgctcggcctgatgtggctaaccctgatcgtggcggaaaccatttcggctaactccggcattggttatctggcgatgaacgcccgcgagttcctgcaaacggacgtggtggtggttgccattatcctttatgccctgctcggcaaacttgcggacgtcagcgcccagtggctggaacgtagctggctgcgctggaacccggcctacaccgctcaggaggcgaaagcatgaatactgcacgactgaaccagggaacaccgttactgctgaacggcgtgaccaaacgctacggcgacaacaccattctgaatgcactggatctgcatattcctgccggacagtttgtggccgttgtcggccgcagcggtggcggcaagagtaccctgctgcgtcttttagccgggctggaagcgccaaatagcggtgacattctggcaggcactacgccgctggccacgattcaggatgatacgcgcatgatgtttcaggacgcgcgtctgctgccgtggaaaacggtgatggataacgtcgggctgggcctgaagggcagctggcgggaggacgcccggcaggcactcgctgcggtagggctggagaatcgcgcgggagagtggcctgcggccctgtcgggtggacaaaagcagcgcgtagcgctggcacgcgcgctgattcaccgtcccggcctgttgctgcttgatgaaccgctcggcgcgcttgatgcgctgacgcggatcgagatgcaggatctgattgaaaccctctggcagacgcacggctttacggtgctgctggtgacgcatgatgtcagtgaagccgtggcaatggcagacagggtgctgttaatagaagagggcaaaattggtctggatctgacggtagatattccacgtcctcgccgcgtgggatcggccagactggcggagctggaagccgaagtactggatcgggtgatgaaacgtggagaagcggagattcagcggataaaggctaatgcctgatgccctcaccccggccctctcccacagggagagggagaaaaccgatgccccgcgaccccacgtaggcccggtaagcgtagcgccaccgggcttttttacatcaggccagcgccttagcaatcttctcgtacagatcgccagacagattttccagccctttcagctgctcaagcgcggcgcgcattttcgcctgacgctgcgcatcgtaacgtttcaggcggatcagcggctcaatcagacgagacgccacctgcgggttacggctgttcagctcggtcagcatttcaaccatgaactgataaccgctgccgtcttcggcatggaacgcggccgggttgctgctggcgaaggcaccaatcagagagcggacgcggttcgggttgctcatggtgaacgaacggtgcttcagcaggctgcgtactttgctgagtacatcggctgccgggctggtggcctgaaggatgaaccacttgtccatcaccagaccatcctgatgccacttgtcgtcgtactcctgcatcagcgcatcgcggcacggtagctcggcggcaacgcttgcggccagcgcggccagggcatccgtcatgttatcggcttcgtggtactgcttgctgaccagcgtgttcgccagctctgcctcaccaaacgccagatagcgcaggcaggtattgcgcagggaacgtttaccgatatccgcatgttccacccgatacgcgtccagcttgttggcgttgtaaatggcgaggaactcatctgccagttcggtcgccagcgtgcgggtcagcgcttcacgcacggcgacgatggcaatcgggtcgatgatgtcaaacagctcggcgatttcagtcgcagaaggcagcgttaaaatttcagccgccagcgccgggtcaatgttctcatccagcaggatggcacggaacgcgtctgccacatgaaccggcagcgtcagcggctggccctgctggtaacggttgacgttcagcttgatgtaggtcgccagcaggctttgtgccgcatcccagcgcgagaaatcgttgcgcgcgtgacgcatcaggaacgtcagctgctgatcgctccacttatattcgagtttcaccggcgcggagaattcgcacagcagggcaggaacgggctggaaatagacgttatcgaagataaaggtctgctctgcctgggtcacgttcagcacgttatgcaccgggtggccgcccttctgtaacgggatcacgttgccttcgttgtcgtatagctcaacgctgaacggaatgtgcagcggatgtttctcttcctgctcggccgttggcggcgtgcgctggctgatggtcagcgtgtactgctcggtttccgggttgtagtcgtctttgaccgtcacgatcggcgtaccggcctggctgtaccagcggcggaaatgagacagatcgacgttagaggcgtcttccatcgcctgaacaaaatcgtcgcaggtggccgcactgccgtcgtgacgctcaaagtaaagctgcatccctttctggaaattctcttcacccagcagggtgtggatcatacggataatttcagcgcctttttcatacaccgtcagggtgtagaagttattcatctcaatgactttatccgggcggatcgggtgcgccattgggctggcatcttctgcaaattgcagaccacgcatggtgcgcacgttgttgatgcggttcaccgcccgcgatcccagatcggagctgaactcctgatcgcggaagacggttaagccctctttcaggctcagctggaaccagtcgcgacaggtgacgcggttcccggtccagttatggaaatattcgtggccgataacgcgttcgatatcgaggtaatctttatccgtggcggtatcggtacgcgccagcacgtatttagagttaaagatgttaagacctttattctccatcgcgcccatgttgaagaaatcgaccgcaacgatcatatagatgtcgaggtcatattcgaggccaaagcgcgtttcatcccacttcatggagttgatgagggaagtcattgcccacggtgcgcggtcaaggttgccacggtccacgaacagctccagcgcgacttcacggccagagcgcgttttaaaggtgtcgcgcaggacatcgaaatctcccgccaccagcgcaaacagatagcagggtttcgggaacggatcctgccactgtacccagtgacggccattctccagttccccttcaccaatccggttgccgttggaaagcaggtacgggtacagcgttttgtcggcaataattttggtggtaaagcgcgccaggacgtccgggcgatccagataccaggtaatgtggcggaaaccttcggcttcacactgggtacacagggctacgcctgactggtaaagtccttccagcgcggtattggcggcagggctaatttcattcacgatgcgcagggtaaagcgttccggcaggttgtcgatgaccagctggttgccttcttctttatagtctgaccaggcttcatcgttaatatgcagggaaaccagcgtcaggtcttcaccatccagacgcagcggcacggctgtcgcgctctggcgcgtcacctggcttaccgccgtcaccacggtttttgtggcatccaggtcgaaagtcagatcgatatcgcttatcaggtattccggcgcacgatagtcgtggcggtatttagcttgtggctgttgtgtcatagaaaaccttatgcatcgtttgtcgagtaacgattcaatatattcctgttgtgtaaaacgcgctatgcagaatgttcatcttttcaggcacaacgccctttttagctacatttttataatatgaacgcataatttttaaaatcgataaaaatcgtccaggagcgcattaaacaagggctgagcgagaacgatgcaaagctagatttgcgaagtttaacgaacttaacaaggattttttgccccacccatgccccacgactaatttcaccagagagcagacaccataaggcttgtagaccattcttaacatcaaaaaactttcaaagctgaactgataatccgccaattgacttgacagtctttagttctgggctttagggactgtgtatttaaccagtgattggcagtgactatcatgcgtgtcgagatctgtattgccaaaaattaagcgagggctttgccgaaagactccattaacgcgctgactcaggagctgacaaagcgtctgagtacgcattatgaatacatagagatgatcgtcaagacggcaagcaatgatggcttgtccattgtgtggcttagaaaaaagggaataagacatatgtacaggaagtgtcacaagaagcgttggaaagcgcagatgactggtttacaggatgattgaaattccttagaatcttcgtcggttgctcttacatcaacaaccgacgaatttttactttatgaattatatacaaaaatcaccaattagtattggaccagacgttgacattctcaatgacatccgagatttttgcttcaacagaagttaaaaaaaccttcctccacaaactgaaacgacatgccctgccgccaataatcactttgatttatattaaaaaacgagtgaaaaatctctcaaaggatatttaataaatactaagcatccagatgaattattttcccacctaaccattcctgtttatacaataattgcctaacaagttcgtatctcatacttgttgcaatgttatttttatccgatacaaaattctttacgttaaccacttccacaactgcgtgttttttgcatattgtcgtagttatcttatgtatggcatccagtctgaaactacctgactttaatcttattttgtcaattttctttttatttttcagccaattgttactgtttttaactttcctacttaactnnnnnnnnnnnnnnnnnnnnnnnnnnnnnnnnnnnnnnnnnnnnnnnnnnnnnnnnnnnnnnnnnnnnnnnnnnnnnnnnnnnnnnnnnnnnnnnnnnnnnnnnnnnnnnnnnnnnnnnnnnnnnnnnnnnnnnnnnnnnnnnnnnnnnnnnnnnnnnnnnnnnnnnnnnnnnnnnnnnnnnnnnnnnnnnnnnnnnnnnnnnnnnnnnnnnnnnnnnnnnnnnnnnnnnnnnnnnnnnnnnnnnnnnnnnnnnnnnnnnnnnnnnnnnnnnnnnnnnnnnnnnnnnnnnnnnnnnnnnnnnnnnnnnnnnnnnnnnnnnnnnnnnnnnnnnnnnnnnnnnnnnnnnnnnnnnnnnnnnnnnnnnnnnnnnnnnnnnnnnnnnnnnnnnnnnnnnnnnnnnnnnnnnnnnnnnnnnnnnnnnnnnnnnnnnnnnnnnnnnnnnnnnnnnnnnnnnnnnnnnnnnnnnnnnnnnnnnnnnnnnnnnnnnnnnnnnnnnnnnnnnnnnnnnnnnnnnnnnnnnnnnnnnnnnnnnnnnnnnnnnnnnnnnnnnnnnnnnnnnnnnnnnnnnnnnnnnnnnnnnnnnnnnnnnnnnnnnnnnnnnnnnnnnnnnnnnnnnnnnnnnnnnnnnnnnnnnnnnnnnnnnnnnnnnnnnnnnnnnnnnnnnnnnnnnnnnnnnnnnnnnnnnnnnnnnnnnnnnnnnnnnnnnnnnnnnnnnnnnnnnnnnnnnnnnnnnnnnnnnnnnnnnnnnnnnnnnnnnnnnnnnnnnnnnnnnnnnnnnnnnnnnnnnnnnnnnnnnnnnnnnnnnnnnnnnnnnnnnnnnnnnnnnnnnnnnnnnnnnnnnnnnnnnnnnnnnnnnnnnnnnnnnnnnaatcagcgtcctgaatacgggactgcgcttcagacaggttagtagtggtattgttcaggttggttaccgcagaattcaaacggttctgtacagcacccagagaagaacggaatttgtcaatctgagaaatagcctgatcgagtttttccaacggattcgtggttgctgtggaagccactgcggttaatgctgcaccatttttgaaatcgtgaccgctgacttgatctgctgcataatttttaccgcccacattaacaacggcagtttgtttatcaactccacctaattcaacagcaccagtagcagttgcaccagtggaatcggtgtatttaacagtgttaacatcaatggtggtattatcagcaccgttgtagtcagtcttatacaatttaccattgtaagaaattgcatatccagcgtcagtgacattaccttgagaatcggtagctgaaactttaactaaagaagtattcgcactcgtcgcacctgtaacgttagcaccaacgagagtcgcggctgcagctgtagtattaattgccgtaccagtttgaatttcagttacagtacgggaacctacaggaatactacctacagaggtccctaatgttgaactacctgctgccgctgttacttcatagacaccattctccgatgaattcgccgaatccgagattgttgtatagtacttaccagttatgtcatcgaaggatacggcagatgcagttgcacctgcacctaaagtagcaacgtcgattgcgccaatagcggtaccagaatcggcgaaactacttttgacagcagtagttgttaatgttgaggaattctgaacattaaatcctgataaacctaatgttgaagaatcgatcttttgtaaatcaatatcaatagtctgcccatcattagcaccaacctggatagacattgtcccgtttttggccagtacgttcacgccgttaaactgagtctgaccagatactcggtcaatttcacttaagcgggatttgatttcatcctggatggaagtcaaatctgaatcggagttggtaccgttctgcgcctgaacagtcagttcacgaacacgctgtaagttgttgttgatttcggacagtgcgccttcggttgtctgcgccagagagataccgtcgtttgcgttacgtgcagcctgagtcaagcctttgatgttagaggtgaagcggttagcaatcgcctggcccgctgcgtcgtctttagcgctgttgatacgcaggcctgaagacagacgttcgatggctgtagacattgccgactggtttttattgatgttgttctgagtgatcagcgagaggctgttggtattaatgacttgtgccatgatagtaattcctgtttgactgaacttaatttaagtatacggcttccaccattaggctcctgcgccgctatgttcactatcggcaaagtactctggacctttagaagaaaaagtgaaaaatcgtccccatctactttcagacaccaagcgaaagaggactgtatgcttgtgatgcattgtgataagttcgttcccccccctcaacccaccacgataaagccacataattcaatatgttgagcgtcgtaagtaaactatctcgtttgacaggccggctccctcttctaaacctctaatctcttcatttctcagcactcaacaagccaacataaccccatgctccgatgataagacctatacaaggcaaaaatgcttagctacctcatcggacgccaccttggtttatctgtcttttttagtaggtgtttgaaagatggtttnnnnnnnnnnnnnnnnnnnnnnnnnnnnnnnnnnnnnnnnnnnnnnnnnnnnnnnnnnnnnnnnnnnnnnnnnnnnnnnnnnnnnnnnnnnnnnnnnnnnnnnnnnnnnnnnnnnnnnnnnnnnnnnnnnnnnnnnnnnnnnnnnnnnnnnnnnnnnnnnnnnnnnnnnnnnnnnnnnnnnnnnnnnnnnnnnnnnnnnnnnnnnnnnnnnnnnnnnnnnnnnnnnnttacagttattctctgtctaatacatgaaccggagatttgttcaatgaatgtttctgcccattttgttatagtcttaaaccttgcatgcgctgctttattattcactctgctcaatgcccggtttgatttattctgatcaggatctcattttacttacttgaaatccctcctaagattcatgcaagtacatttcttaaatccgatcgagtagtcaatcgacaatcatcagggagaataatgacttgataaaggacgtgctcatagaccatcgccctaaccttccatacacaggtgggtatgtagtgtatgaacccccgtccaactagttccttccgattacccttaaagcacttttcatggtgatgtttttccttgttacatatttggatgcttgttttaaggcattattcattgctattacagtcacaggtctagccagccctttaactcgatttgatctactctggaaaacataaatatcagaaggattgcaatcctttctgtacgcaatcaacttagaaagcattaaatttaatctaattgttcgtggctcaaattttggagttccagccaagtgcagcatgtcatcttcgatatcggaatatctaatagtaataaccctgctaccttcagcacggagagaaaataatgttaaccataagtctgcccatgttgatgagatcttagacaacccaaagtgaatagccctgaactcttcaggtgttatagaatctgtttttgccatgaagaccgccaatgctcaacctaaccacttaccaacatttcaacaactttattacattccttcaatactttattacgaaaattggattaaatgtttaaaattttttcctctgccactaccgcgccggaaatttcttatacaaggtgcacaccgcaacgtcgtaaataatcgccacctgctttctgtccactccgtttgcgatcagcctgccagcctgcgtccattgctcaggggttaactttggccgtctgccgcctatgcgccctttctcccgggctgccgccagtcctgcccgggtgcgttccacgattaactccctctccatctcggccagggctgacatgatgtggaatatgaaacgccccattgggctggaagtgtcgatgctgtccgtaaggcttttgaagtggatgccgcgctgccggagttcgtcgaccagcagtaccagatttcgcatgcttcgcccgaggcgatccagcttccacactaccagcgtatcgccctcactcagcgttcgaagaagctttttaagcgctggccggttcgctaccgtcccgctcattttttcctcaaaaacctgttcacatcctgcgcgttcgagagcttgtcgctgaagatctgtgttttggtcatttgttgacacccttacgtagccaatttgcatatttttcacccaatattttctgcaaaaaaatcaggtgaagttatcggcatggctgccgcagggcaatctataaaacgtcggtttagacaaaacagtaaataccgaaggaaaccagtccatttcaggagagaaaaacttcactggccctttgaaaattaccgcagcatatccgcaaattactttatgggcgactgcccagccaaacggcacttatggtcgggtagttacattcggtagtgagggtaacaaaaccttcattgctgcacggcaatgggaaggcggaaataacacttgcgtgacctatctgcccacttttaaggacggttatttcacattctggacaacctcaaatacgacagtaacctctgacggaaccattaagcaggcttctcccattgccagaatcgttaagtctcagggagagaaccggcgtacggatgttgaaaatgatggattcacatggtgcggctgcggcacggttaacgccgaggcagagggagtatctatttctcgccttgacacgggggtttacgaactcaccggttcggcaggcctggcgtctgatggatggcagttactgccgccaatggaccctggcggcatgggcgagatgggggttgttgaagcggagcaaactgaaagcggcggactaattatccgcctgtataagcagaaatacatgctgagcgatggcggcgagatcgtcaaaacgaaaggagaaccaatggacgtgccggtgagtagctggatcgatgttcgcctggatatgccgacggattcagttttcaaacgttcacagcagcgtctgcaaagtgatgaagagagttagacaactgtcgcaccgcgaaggtcggccagttctttttcgatgatttttaaccgttcggtcagctccttgatggcctcaacatacagggcgctcatagcactgtagtccacggttttaaggtcgttaatttcctctcctgctggcgtagtgccagtcccgccagaacttacagcaacgggcagaaccttttccagagcctgggcaatgatacctgcactgcgtaccgactccgattctgtgagctgaatgccgaacgtataacccgtcagggaacatattttctccagcgctttgctgacgggctctttgtcgaatttcacgcgctcgtctgaggtctggttcaccgaaacgcaggtaaacttaccatcagctccgaaactgaagctatagccattcgcgccaccattatcgttgttatcgggcctgagtcggatagaaccatccttgccagcatagataaccccacgtgatggacctgacgcaccatagaaccagacgtgagaattttgggtgtcgctcgaagctcgtacgttaagggacgttacacctgcaacgctcccttttgcgtcaacagaagaattgaaggtggcagagtgatcgaacgagacggaacctacaaagcggtgagatcccccgtaatatgtcattgctccggcgcctgcggttcctgagataccnnnnnnnnnnnnnnnnnnnnnnnnnnnnnnnnnnnnnnnnnnnnnnnnnnnnnnnnnnnnnnnnnnnnnnnnnnnnnnnnnnnnnnnnnnnnnnnnnnnnnnnnnnnnnnnnnnnnnnnnnnnnnnnnnnnnnnnnnnnnnnnnnnnnnnnnnnnnnnnnnnnnnnnnnnnnnnnnnnnnnnnnnnnnnnnnnnnnnnnnnnnnnnnnnnnnnnnnnnnnnnnnnnnnnnnnnnnnnnnnnnnnnnnnnnnnnnnnnnnnnnnnnnnnnnnnnnnnnnnnnnnnnnnnnnnnnnnnnnnnnnnnnnnnnnnnnnnnnnnnnnnnnnnnnnnnnnnnnnnnnnnnnnnnnnnnnnnnnnnnnnnnnnnnnnnnnnnnnnnnnnnnnnnnnnnnnnnnnnnnnnnnnnnnnnnnnnnnnnnnnnnnnnnnnnnnnnnnnnnnnnnnnnnnnnnnnnnnnnnnnnnnnnnnnnnnnnnnnnnnnnnnnnnnnnnnnnnnnnnnnnnnnnnnnnnnnnnnnnnnnnnnnnnnnnnnnnnnnnnnnnnnnnnnnnnnnnnnnnnnnnnnnnnnnnnnnnnnnnnnnnnnnnnnnnnnnnnnnnnnnnnnnnnnnnnnnnnnnnnnnnnnnnnnnnnnnnnnnnnnnnnnnnnnnnnnnnnnnnnnnnnnnnnnnnnnnnnnnnnnnnnnnnnnnnnnnnnnnnnnnnnnnnnnnnnnnnnnnnnnnnnnnnnnnnnnnnnnnnnnnnnnnnnnnnnnnnnnnnnnnnnnnnnnnnnnnnnnnnnnnnnnnnnnnnnnnnnnnnnnnnnnnnnnnnnnnnnnnnnnnnnnnnnnnnnnnnnnnnnnnnnnnnnnnnnnnnnnnnnnnnnnnnnnnnnnnnnnnnnnnnnnnnnnnnnnnnnnnnnnnnnnnnnnnnnnnnnnnnnnnnnnnnnnnnnnnnnnnnnnnnnnnnnnnnnnnnnnnnnnnnnnnnnnnnnnnnnnnnnnnnnnnnnnnnnnnnnnnnnnnnnnnnnnnnnnnnnnnnnnnnnnnnnnnnnnnnnnnnnnnnnnnnnnnnnnnnnnnnnnnnnnnnnnnnnnnnnnnnnnnnnnnnnnnnnnnnnnnnnnnnnnnnnnnnnnnnnnnnnnnnnnnnnnnnnnnnnnnnnnnnnnnnnnnnnnnnnnnnccagagctacacaaaattcgtccatcgtagtcgttcgtacccagaaaatggaaatcaacaaagcttgcagaagagggttttttggctccaatttcgaggcttgcaaagtttgctgtaacctcatctcccaaaccgacctttattcacccgcatcagcagtcatggccagctctgctgctctgattttttggttgtataaagaatcggctggcatttcgacacgtaccgacacaaactggtcacggggaatgtcgacaggatcaccgtcacccacgccttccagttcgtttctggcgaatgcaggcgcatcagggtgagtacggtgataggttttcaccagtaccgaaccaacggcgttaacctcataatccagccagataagcggttgcttgttgcgatcggtagggatgtcaaaacctccatcgatgccgccccatgctgcgtctgagttcagcccctgacacccttccaccagatattggcctgtggccagacgggttacagtgcagccctcagattcatcgttagtctggtatgttccatctgaaaaaagcttaattacaggagatgcggctttaagcgtaccgtcggatgcttttgtagtgtttgcggtagtgtacatctctatcggggcttgccatgtaccgccgacaagtccccgcgcgaaaaatcgtattgatccgcccagcctaaacccagttacaactttattggatgcatcataaaaatagggtaagcaggcataatttgctccctcagctggcagactcccgccagatgctggcgtcctgtaccagcacccctgctgcacattagtaaaatcgctgatcgtgactgggtttattgaacctataccaaaatcaccaacagagagcatattgcctgaagagctgtaggcatcccgtgtagcgctgcttcccaaaccgaggtttgtgcgactgccttctgccgttgttgccccggtcccaccctggctaattgggactgctccattacttcctttctggaccagtttgccgatcgccggaatggttacacgagcgccgttgatggtaacggtgatgttctggtttgctgaggtggtggcgaacgtctcccaggcgccgatgttctcgtcatactcgttgatgagctgagacatgctctgcgccaggccgtcgaccgagagactatcagtaacaagaatgccgtacttctggccgctcaacgccggagacgcggcaggcgtaaccgtcagtgacgttgcactgttgatggccgtgatctgaaacatctgtaccgggttagaaagaacaaacaacgtctggccaacccgaatctggctggcgggtgccgtccagttcgtgccggtgccggtggctgtatttccgttaatggcgatggtgccagtgttataaagcatattttctccaggcaataaaaaaccccgccggagcggggtttgttcaaaactgaatgggttagtggcaggtggtgcttgtgaacgtgttggcgctcacccatgaccagttaaagggataaccggcgcggtactgcgtctgattattttgcttgcggactccgtagatctggacgctgctttcctgtccgccaaccaaggctgttccggtgcatacaggttgctgcttctcaataacgccagcgcaaccggagagcaataccgctaccgccaggcaaagaatcatatttttcatagtgattatatcccagggcattcatgaagctacacaataacaatatgaatcaacgggatataattgatttggtagatcaattattcgaaattgatcgttcaaaacgatcaatcaaagttggcgcagttgatggccataatcacgtttctcagattcgaatacgcgacgttctgaaggttgccgccgggggttgtctgcggtctggcgaatatccgcgtattgcttccctcaagttttgccatgcttttatatattgccatgtatggctgcggctgaccgccagccgatataaccccggtaattagccccagcatggcaggtatacaggcccacttcccagccagagttgtattgatgttgtatcctgagctggcatccaccccggcggtaccgagggtgacaacatcgctcagcgtgcgcgtttcgtttgttaaaatcagcgtccctgatgcatcccacacagccagcccgtagtctggctttgtctgcgggaaaatagagaaaaaataaacgtacgctgtgccggttgcattcggtctgagaaaatcaatcgtgatggtgttcccgcttatcgtctgagtgatttcgacctcaaccgtgcaatgaacgaaggcgacaacaggctgacctgcggggaatgtgtgcgtcactttggtattgaaccccgatgttccctgaagtgccgctgtctttcgcgcctgaagagcgattggcgagctgttcgcggtcacccatacttccccgctcgtggtcgtcagtaaaacgccatactccgccatttatgccctctcgatctggaaaatgagataagccgctgccgcaggctcagtccctgctgagtagtcggtatcgcctactgctgacactgttgctgttccccccgaaatggtgatcttcctccgactcgtaccaaactgatcgccgttcatgctctgaaaataggtcagcctgcaacccggtggaagcgctacggtgtaagagcctattttctggttctgagccagctggagatagccacaaacgctgacaggcttaacaccatagttatttacattgcctgaggcgtcccatgtctgaacaccatattccgccatccagtcctcctgaaaaaaaagaggccccgtaagaggactcccgttaccatgttcccgtgattctcccgatctgcaccctcaacacattcctggagtcccgcacgctgattgtctggtttgtctgtttcatggacccctcaccagctgtcgaaccgtagttctcaaacgtaccgcccttatccagcctccacccgactgagccagcgacatagttattggactggatgtagttgccgattttggcgttactgatggtgccatcacctatcagcgcgtctctgatgaaaacctgcccgttctgaataacgaacggaagcgtaacggtcgctccggcctggtgcgttacggcgaagcggtcagccaggaagataacctgcgactgcatgccggacggcgtattctccacgccgatccccatccctgccgcgtaaagctgaccattgctggataacccgaccttaatgctgtacatcgccttcaggtcgccgttgacgttcgcaatggcctgcgcgttggtggtgatcgctgaagtgtgcccgttgatggtcgccgtgatgccgtttatctgcgtggcggtggcctgctgataatcggagaacgtctggttcaggctgttgatggatgccttgttgccgttcacgtcagtctgcaaacttagcagcgaacgcgccgttgcctccttctcgttgacgatcacctcatcaatgcgatccagctgcgcgctgttaccggcgaccgatgccgacagcgttttgcgcgcggccacctgcgccagattgccctgaataatcgcgatggcggagttcttcactcctcccgtcataccgtccacagacacgctgatgttatcgatgcgctggcccagcgcggtatcagccgtcgccactgtctgctcaagcttgctcagagaagaagacacatctccgaccgtgctcgacaggtttgtaacgctggtctggaccttcccgatatcctgggcgttttttgctatttcctgcgcctgttgcgccagttcgtcattggcctgtttgatatcgttagccatgccagcaattttttcattgctgtccaccgcgttctcgatcaggtctttgaacgtatcggagcctttcatgtcctccagaatggcatcggtgatatcggatacatcaatgctggcctgtccgcgcacaaagtctgtataccctgattcgtttccgctgcggtccaccagctgcgcgcggtaccagaaaatttgccctgccttaaggcccatctgctgatacttgcgctgcggatagggtacatctgccagcagcatcgcatcgtcttcggtaccggtcaggctgtactgaatttccgtcttcagcgtgtcgtcggtattcgccgggaatccccagatcagctcgataccgaataccatattatcggaagcgatgaagccgaccggtttcggcggattgcccactttaccggtcagcgttttctcttcggaatagccccatccggatgaaatttctgcggcattgattgcgcgcacgcgcaccagatagcgcccggcataaatccccgggacgtcgaatgacgtggtggagctgcgcggcacgttaacccagttcccgtcgttgcggcgccattgcgcttcataggcgatagcgttctgcacctggtcccagctcacgcgcatcgtttcgacgctgatattttgctgcaccacagaaaacgagctgattacgatgttcgcaggcggcgactggttgcccggcgggatcacgctcaccggccgctggtcaatgatggctccggtatcaatgcgatcgaatttatccggatcgtgatttgcaccgacgattgtgaacgtgccgtcattattatcagttaccgtaataacgcgatactgctgtgcgtagagctcatcagactcaatgacccatacggcctcagccacaggcgtttcgctgtaagcggtcgtaacggtcactttattgcccgtaatcgactgaatggtgcgtgactgagaaacacccgatggaagattgacaatcatcctgtcggctgccgaagcatccggcgccctgtccagcgtgagcacgcgaccatttaccgcagagatacggccgcccagttcgcgcccggagagatttcggtccgctacagcaattacatagccaggctgtggaatgttgccatcttcccctacattgaaagtaacaacgcgatctttattgttggtgaggatcccccatcgccctttccgattcgcttcagactgacgggtacaaccgatcgcagttatctcaagttgattaaacccataacgcgcaaccagcgcctgctcaaaaacaggctccatcgcatcagaataagcgttatcaggatcagaccaggacaccagcgcattggtgtaacggttctttgtggtgctgctggaataggtaaaccggccatcgataacgttcgcatgcgtgtaagtaaaatcaacatccctcggcatgtccgccaacgcaacaatcttgtcgtcgccccagtaggtcatcccgcggaatatagcagcgaaatcacgcaggacagtataagcgtcgttgcgttcctgaatgtacacattgcatgcataacgcggttcggtaccacttccgcctttgccatccggcaccatctgatcacaatactgtgcaacctggtaaagtgtccatttgtctatgttcgctgttgtgagacgatccccaagcccgaaacggtcgctaaccaccaggtcgtagaaaatccatgcagggttattggtccaggcccatttgaatgtcccaagccacgtaccgctataagttcttgtttccggatcgtaagtatccggtacgcggatgacacgtccacgtggttcacaggcaatttgaggaatagagccattaaactggctggaatcaaactcgatgtacaacagagctgtgtttggatagcgcagtttggcatcgatgacctctgtataactttggagcgtcatcgtgtcgccaattttggcactgtttgcgtcagcggtaattttgcgcagtctgatggtccaggtgctgccagctttcggtaaatcgatgcgatggctgcgttcataaccggatgtggttttcccggtcacattggtatcaaggaccttttgccagctaccaccattcgtttgaagctccaccacatagttgatggagtacccaaccaaatccccgttatcctgctgtttgaaaagagatggccacttcaggcgcaggcgaaccgccgaaagctgcgtattggtgaaggtatgcgtccaggctgtttcgctggatacttcggtacctacgctgatttcattttctgtgccaggtatcccctgaatgtaatcctgagcctgcgtccctggccgaaactcccacacgacaccgctgaagttctcggaaccatcagcattttgtaaaggtgtgccgtcaagatagatatccttcgcggtcagcccaccagcaaactccccttcaccgagaaccatcaggattttcgctttcgcaacggactggagatcatcgggctgctcgacgggagtgcgggaactcgagctgccgcctttacgtccggtaattgttttagccatatcgcgcccataaaaaagccaccgaaggtggcctgattgacaaatatttgttattgctggtcttctacgtaaatcccggcagaggcaacagcgccgccgattcgccgtttaccatagagaatggggacagggtttccctgagaggttgtgttcgtcacgccaccaaatgcatagctggcgcggttatctgctgattgcttgctggctagcccggtagtctgtggagaaagcatctggactacgccgccgatcgccattgatgccccaatccccgccacagctccccatccaccagcaaaagcagtcccaccaatcccgatcgcggcccctcccgtgacgaacgcagcaacagcgacaagggcaaccccgaggattgtctgaaaaaccccggctcgcttactgccgatgatcaccggcgcgatacggatttcctctgtgctcctgtccatactgagttcatcgtttacgaggtttcgtttcccgctgaataccgcataagttaaaccccgttgtttgctggtgttaaggaaacgctcaaaacccggcacgataacgctcagggcgcggatggcctcttttggtgaagctactgataaacgatattcacgcccgaaggtggcacctagcacgccgtacaatcgaattgtgcggacaggctcaacattgagtaatgcagccatttttcccccataaaaaactgtcacaggcggttatcagaaacagtctttaaaccgcaatattttcattgtgcgctcacgccagtaaccgccataaggtacgcgctggctcagatgcccataaaggtgatgcagtagcatgttgccttccagcagaatccccgcatgattccacttatcagcctgaacctgcatgatcaccatatcgccaggtttcggcggcccgtcgaattcacggaatccgcactcgtaccagcaatcctgatagaagttgtccggatagtcgttttcccaccagggataatcaacccggtaatcgtggagttcgataccatgcgtttgccggaaatagctcattaccagcccccagcagtcgaagtgaccaagcacaaaaggacgctccagcagcggcagctctccgcgcggctgaatggtgcgtaaatccccctctggccagctcacgatatgccagggtaaaagcgttgagtcgcattgcgctttatccagttcgctcggctgcgtagtggcgtcagggtggctgtgaacgatggcgatcaccgtaccccagtcctcagcaactgcgtaatcttccgggcagaggacaaaatttccctccggcgccgcggcaagattccggcacggaaaataacgttctacgcggcttttctgcgccaccacaccacagcactcacgaggatattcagcggctgcatgcgccataatcgcatcaatggttttctgacgcatatcagctcctgattaaagacgttcccgggaaaccaccaaacggcagttcttcattctctccgaagcgaagtttgcacgccgtgagcgtgccgttacagacatcaagcgagggatcatcgacaggattattattgttatcgaagtatctggttccggcataatcgcaaccgtcaccggttcggtacttattgcgcatgcaccaggtacacagggaatgaagctggcgcgtggggatcatcttaccctgcaacgacatcgggctatcgagtacgaattcgatactttcgcccggaatttcgctgcttttaccatcaatgtaaaaaactcgttttctgacctgttgcggatcagctgttgcgttacctgctgggaagttcttcgcatcgagataatgcgaataagtgtcatggatagtgactttcgcctgtagcatatcgtcataagcaaggcacagcgctgtaatcttgctatcgatatctgcaaccgtgagtgttggctgggcactgttgccgtctgtggaggcttcaagcccttctatttgatacggccaggcggcatattcctccccctgccaccagatacttttcgccttcagctttgattcatcgccaccagcggcagcgatttcttcttctgtgtgcgggaggttgtatgcgtgaaatcgcagtacatcatccacgccgaacgtagagccatcaacttcgataagccggactttattaccgggctcaaggctttgatagtctgctgtgatcatggtgcgtacgcctgtttgaatgttgcggaaatggtcagaacgttgctggataagggctgtgacttgattgattcggcctcaatccggtagagcccagtttcgccaactggcgatgtccagatgaatgactttataacgtgagaacgaaagaatttaagggcctggagcatgtccgtttttttgcccgttagggttacaggccatgactgcttttcagggttgatgccttcccctgcaatctgctcatagccatcgccaaaggttgcagagcgggttttatggctaaacgttccttccattcccgcctgtatctgcgttcgccaggtgaacgtttccagtgccatgtttgctccataaaaaaagccacccgaaggtggcttgtgacaatatgagaaggaaattagcgggtttcacaaccaagctgagacttgtcgataatctgcgtgccttcaacacggtaaccatatgtgccgaacagaaatgcgtggtttaattgataaataacaacatcgcttaggcctacggaacacttgtctttttcaatagcccgatccattgcagttttaacgcttggaatgcccagcgggaaaataactattggagctttgtcttcaccagtcacacgttgacctttttcaaacttagctgcgttcaggttgtaatttttagtactaccaacggtcatatcagcaacacgaacagtacagccagacaacattaaagccccaagagctaaagccactaccttcttcattttaagtttcctttgattacaatcggaaacatcttaacatgatgaataatgtgataaaacaaacaccatgtctcttatcttgattttgttgcattccagatgagcccaccaggctgaagttgtttcgcaatacctgcccgaacagattgatcaatagtctgcttgtaagcgcgagaaacagcatcgttatttgcagaagtctgctgctgtgaattttggttttgaacaactacggacgtttgaatacttaccccaccggccgatgatgactgaagcccatacatcggagcgtggccaacataaccgccatttgcataaccctgtgcgcttcgcataagtgaatagaggtttccaacccccagcgcacttgttgcctctttggtgaagacgaattcgccaccatgcaccacgccttttggctgatactttcctccatcccctgtgtagccgccagtatcgaattccggaactgcgccgccactagaaaatccgaaaaatgaaccaaatgatgtccccccaaacgcagacttcattccgttaaccagcgccaactgtgtcagcatctgggctgttcctttcaaaaaggttgtcaggaaatctgagaagttagcttttccagtggtaaaaaagtctgtaagagtgctggccataccggtgaatgcattgctggtaagtgtctgcacttgtgagtaaacattggttgcggagtcctcaaattcagcccagccctttttcgcgccggtcaaccagtcgccacgcaacctgtcctctgcggcatagtaattattcgccgctttgagctgcttctgataaccaacgtcctccagagaaccgccggcgttcacccaacctgcggcaagctgacttttcgcgagttcacgctgagctaaccgctcgctcattccagctccaccaaccaaagcagcctgtttctcagccatctgcgtaacatatttctgagaggtatccattcgcttgttcagctgttcctgtgcggtaatctgatcacccaacagggctttctgccgtgccaactgaagcacctggtctttactcgccagcagggattgttcctgcttcgtcagtgaacgtgaacgcgaggcttcttccagcacctgaaatttcgcctcagtggtccacagatctttgcgctgctggctgatagtgtcgttcagccctttatactgctgaagagcacgcaactgcgcctgaagcgccagcaattcggcctgagcagtgtcagtactgcggtcgccagccgacacagtgccttgttttcctgttttcgtttttttgccaaacgaagcgactgtctgccgatccttctcagtggtcgcggagcttatcttgcgggatgtatcgaggtacttgcctgcgctaatgtcagctgcgtcccagtcctttttcagctgagatacgctgttaccataagcgccggccatttgttcgttatagtcctgccatccttgcaaagtatcagttttcgcccagtcaggaacgagattaatcgcagccgcgatagaagaagaaataatctggttcagcttctggaaaactatcgcgacgctgtaataaattgcgttaaattcctttagcgtgtttgatgccagttcagccacccactgaccgatgctctgcatagcctcagacgcccatcccttgatatcaagccacaggcggccaaatggtgtcagcgagtcgtaagcctgctctccacgctctgccatcgtgtcgccaaacaaatccatagcttgagtaacggcagcggtctggtctttctgcttaactaaatcgtcaatgtgcttaagctgtgaaacggtaagaaagttgaattgctcattaaggttctgaagagccttaaccggatccttttcaatatccttataagccttggtaatgtcctgagccgaaacaataccagtttcaactgccagcgctgtcgctttggtagctttctcaagctgttgctgggtcattgagccgataccaaccagctctgtcatcagactctggacagtgcccaccgtagtcccagttgaagcagagattgactgggaggatgccataatctgtagcgctgacgtaccggcaatgtttccggtgcggatgatagctttattgatttcgtcatatgctgtgaagtagtccgatcccgcttttgccgcaatcagtacagcgccagccagaccaccaatcgcaacacgtgccggggttaccatggataacatcgcttttagcgcgttacccactccgccaaaggaatcacgcagctgaccaccctgctggatagcgaccatataaaccggcataccggaggccagtgaagtcacaatatccgtcatttgcattggcaggtaacgcatggcattacggtactgccccgcactgatagctccagatttccaggactcttcctgctcttttagtcgggcaatcattggcgcagcgcgatccgaaacgccgagctgggccgctttcagttcaagcaactctgcacgggtttttccgatagctgcaacctggtcctcgagtgagtcgataaaatttttgcctgcggcagctgcccgttgcgctgcctgtgtctgctcaatgcgagcacggccctctgctgtttcagattccatgacctgcgccagtttcgcgcgggttgtctcaagcacgctgttgtaacgcgtaaaatcttcatcatccaccagccctttactgcgaaacttagacaggctctcctgaatggtatcgagttcatccaacgctttgttaacggggctgattttgttgagcagagtctggagctccttgcgctgctgcttcaggctctcggtatttttcttctggttgtcgataccggttcggaacgtactgtttaaatcatccgctttctctgccgccccggtagccgtacgctgaaatcgatctaactcctgattaccgcgctccagttcgccggtattcactcgcagagaaatagtggcgatatcgttactcatccggccctctctttatgcattattttaagcgcggttcgctccattatctggagatcggaaagtgcggttgcctcgtcgtcgacagcatggagtcgcattacccaaggcaggacgttgtaatcaagcccggttgcgccacccatgcccgtgcgccactgagtactgacagactgaaagacacggaacgcaggccagacatcgggccagacatccacaattttatcgtcgtagtcatccggcgtgagtccatagggcgccaggtcttccgccgtgggttcaggcatataaaacgccgaggcaaccgctatcagtttttttcacgctggcccagcagttcgcgatagtaagtctcggtgatggccttcatcgccgccggatagttttccagcagcagcgacagattttccgcgttaaatgcatcaggaagtgcccagccagcaatgatttccatcagaaaatcagtggcggttttgccttcgagtttttccaggtcagccagatctttaagtggcttatgattgaaggtgaatgtcagcacgccatcctcatccccagcgcgtgggatcgagacgttggccttaaaagttggtttgggctgaagggtgaatttagtcgccatcgttgcctcttagtgaaagaaagcctccaaagaggaggctcagactatcgttatgcctggcttatgccgcggcgcctgtgattttgtagaacgtcattgctggcgattgcaggttcagcacgacgcttaccgtttcgacttcgttcaccgccgtggtcggcgtgtcgtcaaaagatgccgtggccgcccagtaacgattctccttagccttcggaacgtacatataagccgccacagtctcttcgttttcatccagctggcgcagcaacggatataccgggagacttgaatcgtgagcgatcgagtaagtctgggagacagcagatttataggtattcaggttgcgctgacggtcatcgctgaggaactgaatctgcgtggtgttctgatcgccaccagatttcgatacctcagtgatttgtggaagttcggtccattcctcaatcttgcgaatagagccggaaccgccgcccgcggcgtatttgttttggtttgtggtattgatatttcgaagagtaacggcattctccgcaatcgcgtcgattttcgcgataacgttatcaatacccgaccagttacagttcacgtgaacgatatcaccgaccgcgatatcgtccgcggcgctgacggtgatcaccacgtgctcagcattcgtcgcgccggtgaaagtaatggctgggccgtagcccgaggccagataaacatgagcgccgttaggcagtgcgaagcccataatggttactcctgtgaaagtagaaaaccggcacaatggccgatgattttgacgggtcagttaatgatgtcggcccggtagttcaggctgatgggaatggtgtaggaaacagcggtcgggataccgcgaaaaattgctggcgtgctggtgatccagcaagtgaagtcacttcctgcaatttcctgcccctcagggaacaattccactactctgcccgccagagaaacgactgaggtacggccggagccggctggcgccacgacattgatctggtacacgcctgaataagtctggcagcgcaacccgagatcgattgttcgcggcgtaacgggcatatcgtgaacggccaggtacatctcgttagcagggggtgtaaacggcacgttctcccatgcaacctgaataccttctgcatcagcccattcaccaagccttgctgcgagtgccgcggcaatatctggaatcacttgggcacctctcttacggcttcctcaaagaagcgttgaaactcagcggcagttatgcgaaccatgccgccaggcgcctgtgtggaatgccccatttcaagcgggtaggcatagggcacgttgttgcagaaataaatggccttcatcccgactttgaagagcgacagcgtgtagttcccggccgcttttgtcagatcacctgtcttatcaacccggcctgtctcgtcagtcgttggcgcatcaaaggacacctgccagttaccgcgaaagcgtccgcccgtataccccggcggtgctttgatatccatcccatccaccacccgggcttttttcttcagtcgcccggttttggtaaggttgtcgggatttgcccgctgcgcctcgttatggtcgtaaacagcgcgattatatgaaacggctgtctggttaacttcccacaactccgggttgcccactggggacatcatcaccagctggttaagtatttttatgccgacggcgcgcactaccgcttcctgattcgttttcgctttattaacgaaagccgtgatttcagccaggaaagccgcgttctcgcccatgttaagccctcagttgcgctttgtagcagagtaccagcgaggcaggttttgccgggttgggtttgataacccggtgggctgtgccatcaatatcgactacgtcgccgattttaatttcctgctctgcggtaaagacgattcgaacatcaccgtttacgatgactgttccgtctatctcaccgggtgcgtattccgttttaacgccgatcgcagtgaactgaacatcatccgttttatgctcgactccaccgataaccgttactgaacccttgcggatgacgttgtataacgctccgttctgcctgagcatgagcgttgttctggcctgcatacgtaggtaatcaatcgccatatcagaccctctctacaaatgcattgatggcgaaacctcgaccaccagcaaggtcgcctagcagcgccatgacagcaggataggacggcgtgaaaacttcaccatctgcgaccgcataggtcatggtgacagcaccttccacacgttcagttttcacagcggcttcgcgcacgctggagagtaaatctccgtcgattgcctctaccgccagcatgcactgcgcggttaaaacctgccgtggaacttcatcaggcgggaaatcatgttcatccagaacgacattcacgcgtggccatgccagagcctgtctcgggtcagcttttgagcctacccagtccagcccctccaggtaatccattgccttaatcagcaaaggtgtgagcttgtcaggcagtttaatgccgcgtaattccgcaaacgaggcaagttcctcttcactggcgtagctgttggcatcaggagaggtgatatcggtattgatcatctaatcatcctgtttatggggctttcgccccattcgttattctccggcaggcgcagtgaaggtgatctcatcagtggttttcgccactccttcaatcgtgccggttaccgtgaaagtgccagcaacgtctgatgtgagtttcaccgttgcaccaccagcagagccggtttgagaactggccgtgctaagcgtgccgcctgtagacgtccacacgacggttttaccggatacaccggagccgttcagcgtgtacttcagagaaacagttaccgcatctgtgctgtcagcggttgcggaggttttatccgctgacagcgttactcccccactgcggattccagtttgatcagcacgcctgccgttgatttgttgctggtgaagtgcttcttccagttgccagcagtgccgatggcggtcaggtcagggttatcacctttggcggtatcccagctgtagcccagcagatcaacgttcaccacgccttcagcgcgatagccaaccgcaaggttttcctgatcgttgatatcgtaggaacggaagcccggcgcctgagactcggtaacggtaaccgctccagctaccagtccaaggatcgcatcagcatccatggtgtccgtcaccagcactggtttacccagcgtgcccggctgcccgccgtaaactactacgcccgcttcttcgtagattttgttggcaatcgcctcatccacaatgtcgaagtaggtcgcggagtgcatcacgaacagaaccactcggttaaacttgtcgccatatttgcgcaggccacgcgtcagggtctttttaccgtcggtctcaatgtcggcggtaacgaccatgtcggcgttagcaccaatcgccgcagtcagcgctttcaggccatatttcacatagccttccagcgtggcatctgcgacatcaacgccgatcacttcggagaactcatcaacggagcggccacggcgtttaaaggcctcttccgtggtttcgtacggaccgtatttccacggtgctttaacggatacagcttcaccggcaccgatttttttacctgtgactttatcgacagagttcacattgcgcgattcaatggaaccaccaactttgtagaaggcgcgtttacggaagtcgccttcaatcagttcgttatccagcaaaatcgcaccgttggaggaagcgttgaacacttccagattgtcctggcgacgctcaagaaacgcggtctgcgccagatcgtcataaataaccaggtcggtattaacagtcgttgccatggtataaatcccttatttcggaagtttgaggaaggcctgctggccgtgtttgcggatgtagtctgctttgtcactggcgctcatttcggaacgtttcaggcttccaccaccgtttggcttgtgtccgcccgcgcccgtaccttctgcgcgagggaacagatgcggagccgtctccttgagtgactccgcccactcaagcgggcttagtggagttttgccgtctttaccgaacagaacatcgccatttgcatcaactgctacggcctcgccctcgtcgttgagctggaatgtgcctttggcacgcagaatcagatcgtcagaagcttccggcagcgcgcccgctttagaggctgctgcacggattgcatccccgaggacccgatcccgaaatttgttggagaacgcttcagctttttccgcgcgctcgttcgccgctttgatctgcttatcaacgtcagcacgcagacgctcggtacgcttatccagcacctcgtcaatttttccggcggcgataagcttcgcctcttcatcgtcagaaaaacgctggagaatgccgcgtacagcgtctggatcgataccgtcaaagcgcgacaggttttctttttgctgtttgatggtgcccagcagttcagagtttttcgatttcaggccagtgacttcactggtcacacgctcatcaatcagcttctggatttcgggggtgatttcgataccaccaccaccactgacctcaccgccgctttcaggtgcgtaatatttcagaagcatgtttcgaattaacataatttcccctcgggattttgtcgggcctcgcccataaaaaagccccggcggatgccagggcgtgtagaaagtgatggttgtcaggttcaagcgcctgatagctgcttaagacgctccaggctgatccactcgcctttgtcagtgaacatatcagccaggtcgatttcacccgcgcggaacagacggccacgctcggcacccagaacctgatcctgcctttgagctggctgacgcgcgagccattcaagatacgtggttttagcaggtacctgcccatccatgccggcacgagtgccctcgtccatctcatcaatatcaatgccgagttcgcgccaggacttgataatcagggtttcagtagaacggcagcagaaatgaattttcccgggcccttgcaggtaaggtactttgtgcccaatcggtttattatccagggtgtagcgcagcaggtcgcgaatgatgcactcgtggctggttttattgtccagcgtagacagccactgcttaccctttatgatgtcactgttggtgctggtgaagctgttgcgcgcggtggcagccagatgattaacggctgttttagcgatgcttgcggcgtttgccctgctcatctgaagcgcgccgtcgcgatagactttattggcatgaccgcgcacgcttcgggagatggattcaaccgtgtcgccagcaagatagccacggcgtacagcgtttacgatccgcgccagcctgtccgattccagattctccgcccactcactcagcaggcgcccctgaaatggctgagccatcgccgcggcataaaccatatcggcggtgattccctgtaacgggtagcgtgccagcacctgtgagggaagaagggaatcgaacaggctcagctgataactgacctcattcctggaaagcgcaagcagttccccttccagcccggactgcatcgaagcgacagcctgatggttaagttcgcgtacgctgccgagcaagctttccagacgtgtaaccgtgaagctatcagccgggagccgatccagtgcatccagcagacgggcagacagttctgcgtccgtctcgttgagcagcttcaccatccggttagcgacacccgtcgcatagcggctaatccagacggaatgggcaatggcctcatcccgcaaactttcgttgactgttgccatctcagcccccggtcaatgagggcgcctgattgcggagcgcatcaatcacatcatccgggctgtctgccgggttgatgaggtcgagtttctgaagcgcccgaatcatgtcagtatcgcgcagtgcgccggactgccatgcattaacaatcgcggtaaccatcccggattcggcaaccttcgcgataaattcctggttgatggtgtagctcgtcgattcgtccttaattccgaggtacttcgcacaccagcccagcgccagcgtgtaagcctcggaaacgtttgaaacgcagatacccagcactgatgttgatgcgctctgttcaccgcttgcctgcgttgcagtcttcgccgtggcgttctgctcaattaacctggcgcccaactgcaccatgtaatcgcgtttgctgtccatggcctctttagccagcatgttcggctgcgcctgggcatagccaaacgagccatctttgggaagcattagcggtgaacgggaaccaatttttactccggtcttctcaaggtgatctcgccagttagtatcaagcccagtcatatacggctgcacctgaccacagaaccacacgctgtcctcatagtcagcgctatttcgataatgtccatggtttatctccaccagcgcggccagcggtgaatcatcgatagtgggatcgttgttctgagcgccaacaaaagtgaacgggatttcatcccagtattccttccctttaggcttcggatgatattcgctgtcgacggcataggttccgcttgcagtgccaccagcccggcgccatacccggcagataaacgtcccttcttccagcgccagctcgcggtactgaatttcgtccttgtaagcgtaaccgtccggctcttctacgcattcgcgcaggaccaccagcaccagctgatcgcgtccgttaattcgctttgttcgccagttgatgatgttctctgccggatagcggagaatgatcgcttcgtctgatgcctctgcatagtcaacataaagcccatctcgcgccacctccagcacgttctcgaccaccagctgcgactgctgataaatgctggtacccgccccgtcagcattgtccagcaggtatttcagcttctccgggccattaaacgttgggtctttgcgatacaccatgccaagcatgccgatcttcgtattgccggcaatggcgtaaaatacagcgcggcgcagatagtcctcattgcgcttacggttgcgcgtggatttatcggttggatcgagataaggcaaatacttattgcccgccgcctttacagcttcgactcctttacagaaatcacgatatttcttccaggcagcagaagccgcccggtgctctggtcgaacccaggtgatgtcgtcgtttgccatatcagaaagtggtgtccaaggtgattgagtatgccggtttcacgatggggtaatccttcacaatgaagtacccaccagcatcattggggtgatcgttatccgctgatttatccggttcgccattagccgcccagatttgctgctcgaggctctcggtgtaaaccgggcagttctggacgttcaccaggtaacggcgctcgccgttggcgttgcagaacatggcgttcatcgagttgatgcggtccttaaccggcgggttggcatcatcaacgatgacgctgaagccggcatcgttaagctgggcaatatccgtcttgctggcgttctgcgatttgcgggagtcgcctgacgcatccgggtagatgtaaatctcccggctcttcacataacgcccatcctcatatcgccagaactcttcctggatacgcttaatcatcgccggcgtgtcgtagactttcaccagttcgcgaaccgcgcgcggtagcccgttacgctttacgtgaacaatcgcggccattttccctacgttgaagtccataccgataaacaacggatccccatcctgaatctcgtcagaacagttgttcagtttacggttaaaggtgtggtaaatggtcccactgttgaggttggtgaacttcccgcgcaggtatgcctgaatcagttcatcaggataagaactcagcagcgaggaaatgtaatccgggggcaggttcttcgcgttgtcgaacgtgctggcctgaatcagcccatacagagcagaaagctcaggcttttcgcggaccgccttcacgaactgctggtagacgaacttgaagccctccggcgtagtcgttacatcgatgccgttacgcaacccgtcgactttgtaacgcatacgggcgatgatttttcgccaggcctgctgcgctttggcagccgccatgacgtccagttcatccaccatcgcattaccgattttgaaaccaactatcgagcctggcttctccattgagcggcagattgtggttccgcggtatcgtcgcccctcgtagaagtgaacctctttgttcccctcattgattatgacgctcagcccccagtcaaaggccacttcctcaatcgtcgggtagaagatgtcacggatctgcgggtacgtcggcgcgaaataaccctggttgattttagggtgctcccacatccccttacagatgccgccacaacccacccacgtcttaccggaaccgaacccggcaacgtaggctttgaatttgtgctgcatcgcgaggaaacgcgcctgaggaatgttaagtgtcgggctgatccccatcttccgccctcgcgtccactacgttgatattgatctgaactggggtcggttcgtcaccatcaccatcaccggccagctctttgcggagtttctcaacctccagctgccggcggtcgatttcgatctgctggagacgctgagcgaactcgctatccgccaggccaagccgtttcattacggcttcgaacatacgctcacggctgatagcggttatctcgacgccgttctttccgacctttacgccggagtaagcgagtcgcgagactggcgagagtttacgcgtatcagcgaagtaaggctggccgataccatcgccgttacagcgtgggcaggcagggttaggctcacgattatggtcatagccatagccaccaacatcagcgggctcgcgacttttccgctcaagcgcttcgagtcgtttctcttcgaactcaaccatatcgcgccactggtactggtgaccgaatccccagcagtaacgacacgcgccgcggcgatactgcgatagctggtttgcatcgaaggtggcaagctgccacatctgcgcgaggacttcatcggcaccgccaagcgtgcgcgcaatggaggctttctgctgttgtgcaatagcctgggcaactgaagttttctgaaggagttgataaccaatttgttcagcggattttttgctgtaacccgccctgatagctgcttgtgtggcgttaccatcctttaggtattccgcaacaaataagcgttgctgagcagtaagtccatcatcatccatcagctcatttgcgctttgttctttctgcgcaatgcgcacttttttctgcgcagatttttgcgcagtttgcgcagaagtttttttgatatatcgacgggcggtagcgtagttcagtccctgcgcttcacaccattcctttggtgatacgccggttgcggcatgttcggacaggaaccgttgctgaagctctccccagtccggttttgccattattcactccaataaaaaaagccaccagcgagtgccagtggcttgaatgtggtaatcagaaatgggttcgaaccgttgggacaaacaatattaagcgctcacccgctggattaaagtagcatcacgcttcgtctggccgatatgaactcctgtatcactctactgacgtatagaaccaagcatgacccatcctactgctacgcgccagtctcgctgctttcaaccaatcagagcatcataagcctcgataatttctttcctgctcacgtatctgtcggctgccaccaatatgactccactttcgcctttcagaaaagttgaaaaaaaaatcaccacatccaaacacctcacctcattattagcatacagataaagaatcttgctccgataacttcgaattttcagcaacttagcaggctcattatcagcaaaaatcaataactgtgccataaaatctccttctacacataattccttacaagagaagattgttagtcccatgaacattcaatcacattgacgaatcttttgcctgtgatatacgttacctttaatagcccaaaagtcttttttaactcatacacctgaattcaattctgaaagaagtgaaaatggcagcaaacaaatcaccaggagtttaagtttatttaattagttatagtgcagaatgcttaaccctgtatatagagttcgcttcttcgcacttttctttcaagtatatgaaccgggtggatacttcactgtttgagcagttcgtcacaatgcagtaaccctctacccacgccttttcatccttttcggcaaacaaactttcgaaaatggcaacccaagtgctgttaggcatgcgttccagttcaaaatacttcattgtccctccctcacgaagggttctgtactcatccaatcctaagattttcatactgcatctcacggtctttttaatgttatgatttctagcatcatatccaggcttttcctaccccaaaatccatgggactctgcattctatcatcattagcaaccagcagatgagctttgtaatagatgaagaatgcgcataagaaagccatagctattcatgtgacatgcctgtcctcagtattggatttaggttaccttctggataaaaacttacccatcaacattaaaaatacaacgattccaacaggcactccaacaataggtgtagcgaacgcgcttactcccacggcggcaaccatacctcccaaagtactaaacatgatgggtatgattaacataatgatagcctggggaattcctgccttccagaggagtaacaccataatgacaacaaagaacaccatgagaaaaggcattgtttgcccccttaattaaacacactctctatataacgaccatttggaaaatttatttagttatctttcaattaaggcctacttgcagttcgcctgccacgctttgttatgcgccaggatgtcgcgcttcgtctgcctgtccagtacatcccagtcgtgcgctgtgcagtagatgggtttaacccagtcgcaagacgtatcggctacctcaacccttacgggtccagttgtcccgcagctcgcgatcaacatcgtcgtcagacatatggttaacagtctgctgtacattgctggcctctttcgttgcttctacccggcgttcggctgctgcgaccgttgccgctgcgttatcttcggtgcgctgctggtcggctttcacttcagctttgctggtgccgcgaatatggcccaggccaaaagcgccggcgatagcggaaataaccaatgcgaccagcccaattatcgtttcgatccccacattcacctcacaccagaacggatttcgccaggttaaatagtgcgcggcgtttatccaacccgtttctgcccccattgataataagcgtcacgcgttccacgtcgccggaatgaagaaggcaaccgcgggaggcatagaaccatgcagcagagcgcgcggcgtattcatcctgttcaagcagctccggatgggtaacaaggtccagtttcaacgcgtgaccacaactgcgatagttactcaggccggtaacctgtttcagcccgcgaccgcggtatttccatccatcaccggcagcctgattgcccaggtgttcttttccccactcaccgccgtaaaccagattggcgatcgctttctggtttgccggttgcgttgccgttctgccaagtgcgacggcctgctgttgcgtgatacggtggctaccgaacgtcggtaccaggttttcaaccgcgtaattcaggttctccaccagccgggtaaatctggtgctttcatgcctcatctgggcaataaacatggcctggtcaagcggtgcggtgatgccgtattccttcatggcggcgtcgatatgcggaaaccagcgcgcagctaatccggcgctgataccagccnnnnnnnnnnnnnnnnnnnnnnnnnnnnnnnnnnnnnnnnnnnnnnnnnnnnnnnnnnnnnnnnnnnnnnnnnnnnnnnnnnnnnnnnnnnnnnnnnnnnnnnnnnnnnnnnnnnnnnnnnnnnnnnnnnnnnnnnnnnnnnnnnnnnnnnnnnnnnnnnnnnnnnnnnnnnnnnnnnnnnnnnnnnnnnnnnnnnnnnnnnnnnnnnnnnnnnnnnnnnnnnnnnnnnnnnnnnnnnnnnnnnnnnnnnnnnnnnnnnnnnnnnnnnnnnnnnnnnnnnnnnnnnnnnnnnnnnnnnnnnnnnnnnnnnnnnnnnnnnnnnnnnnnnnnnnnnnnnnnnnnnnnnnnnnnnnnnnnnnnnnnnnnnnnnnnnnnnnnnnnnnnnnnnnnnnnnnnnnnnnnnnnnnnnnnnnnnnnnnnnnnnnnnnnnnnnngtgcctcagatgatcaaccagacgtgcaacgttgcctttgacggccaccagcacggaaaggaatatgatattggccgcaatggtggcccatgatgaatgcgggtagatcccacacaggtacgccagcggtacagcgctgtaagtgacggtaatcagccaggctaaacgcgaaatccatggccgatgccgcgaatcaccacggcggtaaaacatcagagtaattacaactccggcgcagagcagcgcgttgatagttgctgttgggtcatttagtaccacctgaacctccccggcgcgttatcagcgccaccagcgagccgatgtcctgcttgttcaggaacgtaaggatttgaacggctaacgcagaagctattacggcaccaatagcatccagaggcttctcggtgtaccccgtccaggatgtgagttttgaccccaacaaccccgaacaaagaatgccgacgatatacgacacgaagaagtaggccaggcgacgtaacacactcaggtcagctgctgtcgctatgtagaatactgcgcctgcaaatgctccaaaaacaacaccgtaatcagttccggtcaatagaccgtaaacacttgctccagtcaaagctaaaccggccagccctgtgccggaaaatggatcggacataggtctcccctcatatagctgtgtatcctctcagtaatgaggggaataaaaaaagcccgcacgggagcgggcaacgaatgcagatatttatttttttcaatttcagaacgaagattatcggcagtcttgggaaatactttagacaataaaaacccggcgcggtggccgcgttgatgatcacttgtttactttttccaatgcagattcgtaagcgtctttctcatcaaatagagtcgttaccgctaaaaccttaccaatctgctgcttgagcgccttgacgccaacctcagataggaactggtggatcttgtctccgggttttccgaattcatctttgctacttttagcaaggtcaagaatcttaccttcgcttttggccaagggcttgtaaatttgctcaatagtcaattttttgaataagaatggacgccctcgtcctggcttgtttaattgataaattttgtaccaagcctcataaagttcgttgggaaactctttctcatactgcctagcttcttccctaacaaatgctttgaagagatcaattacttgctgtacttcaggtttgaatccagctacagcgtaagcaacgttagtaataccaacctttgccgccgagttaactaagtcttgagcttgcatagctgcattcagtctagatgctggaagatcgccactatctttagctgccgtaagggctttgcaaatatcaattactactgaaatatcatatccatgtccgccagtaaaagaaccgagtactgcgccatcgttctcccattgaaaaatataaggattttccattttctcaagcaaaactgcgtctacgtaatcttgcatatattgagcgttaagaactcggtcgatatcttttactcgctccccaagaccaatgagttttgccagcccggttttagttaccacagccgttttagattcattgtctaaaacataacactcagtatcaatgccaaactcttccataaagcttcccttgtgggttgctttcaacggcttgtctttccatcttgctgccgctgcttttttggcaatgtcagaacgctgctctttagtaagagacttcgccctagcaatcccgcccttagctttaccctttggatctttcttatcgtctgacatatgcaagcacctttctgtaaaatatgcttgcataataaacagcaatcaaaacacatagcaagcatttttcactattttatgcttgcatagtcaagagcatataaaaggccgccggatggtagccttcagtaaacgaatgttgtagtgcttaatggtccgccatcgaggatttgaacctcgaaccacagaggtagaagctccgtgcactgtccagttgagctaatggcggaaaaaaaagaccagcattgggttgctggtcatgggtcatgggtcatgggtcatgggtcatgggtcatgggtcatgggtcatgcagttgtctctgcgaagcgggtgtataccccacccagtgttatcagtatcgagagcattatcgaatgccagtttactatagcaccgaagaaaaaattcactctgtcaaaggccatcagaaatgaccttttgcaaagtgttatttactggatttaaacaggggccagagtaaagcaattaccccggctaccagcacgccatcagcaaggatggacatcattttgctggtgaagtcgatggcaaccaccaggaacatcaataccccggcggctacccagcgcaatttcccgatcacaggtactggtccagtggaagttgcagcgcctgagcaattttcttgagctgcttctcttcttcttccccgatgccgtcgttgtcagcgacatcaaggcacaggcaaagaacatcaacagcatcgtttgtgccggcaacgtcagccagttcgcgcagcgcctgagcattagcagatcgcggcgaagcttcatagcgagcacggatattgctactcatctgtgcgatctcaccagcgaacggtgcgaaggcaggcaatgctgaaatggttttttccagagtggcgatttctttcgcgtcgcatgtgccgtcggcatacgcaatggagtaagcaccccacaccgtagcttcaaccgcgtcgcggttttccattttcttaacttcgacaacagctttacgtgctttctttttaaagataccgaacatagtgactttccttttagcgggtgagccagcgctcaggaatgatcagcccacagagacagtcacaccgaccgttccctatggctcacccctgaaaggctctgtggttgaattgcgccgagcgtggcnnnnnnnnnnnnnnnnnnnnnnnnnnnnnnnnnnnnnnnnnnnnnnnnnnnnnnnnnnnnnnnnnnnnnnnnnnnnnnnnnnnnnnnnnnnnnnnnnnnnnnnnnnnnnnnnnnnnnnnnnnnnnnnnnnnnnnnnnnnnnnnnnnnnnnnnnnnnnnnnnnnnnnnnnnnnnnnnnnnnnnnnnnnnnnnnnnnnnnnnnnnnnnnnnnnnnnnnnnnnnnnnnnnnnnnnnnnnnnnnnnnnnnnnnnnnnnnnnnnnnnnnnnnnnnnnnnnnnnnnnnnnnnnnnnnnnnnnnnnnnnnnnnnnnnnnnnnnnnnnnnnnnnnnnnnnnnnnnnnnnnnnnnnnnnnnnnnnnnnnnnnnnnnnnnnnnnnnnnnnnnnnnnnnnnnnnnnnnnnnnnnnnnnnnnnnnnnnnnnnnnnnnnnnnnnnnnnnnnnnnaaaaaacccgcactgaggcgggtttggtgtcgtgtaggcgttaacgacacatttcagctttagctttcatgtaagcctcgtgagccaactccgcagtttggaaactaccgagctctttacgttgcccgttgatgcgaatagcggaacgccatacgccgcgagctttgcaccagtttgctccaatcagcttggacttcgccccttttcgaactttgtgtctgttctgttgattaacaaactgggtaacgatacgtaagttgtcccatcggttatctttgggattgccattgatatgatcgacacacttatcagccggcggcagcgcaccgtccatatacaaaaaagccaaccgatgagcgaaaattaatttcttatcgatcattatctggatatagccgtacgtatctgcgttcccggctattttgccaggcgtagaccgtgagtttgttcgcttgatccaaacaaataaaccagtcaaagggtcgtacttcagaacctctttcagccgttcttgggtgatgctcatgatatgcgtatgccttactttgaaatgaacctttgccgcacaggaaaccagcccgtcgaggctcgccagcgctaaccgacttcctcaaaggctcatttcaaatggattggttcgacgtgatgaatgcgcgggcggtgcgcaggaaatacgggtacaaaaaaacccgcaacgtggcgggcttttagaggttaattatctacaggcgctatactccataatcagaagcatacaggacatttttatgcaaagtcaacactaacgtgcaaaaaagtgtcgccatttgctccgatcctattaataagttgttgccttctcaaattctactgccgcgtgacgctcccactggcgcagggtgtccaccagcatttcataaaagggtttccagttgcgtgaccatgaggactgatggaggtccgggagacgcttcagaatggcacggtgtaccgtcgccgaggagatagcagagaagccattaccagagcaacgttcacacgttttgaaaaccggtgcgccacgttctttggtcgctttgcgatccagcacttcacctttaccgccgcatctgcaccgcgcaaggattacctttttccctccgcaggtttcgcaaacccttttcaccagctcatttttaatcttcggggccaccacttcggcaccgtcatcgtcgaagataccaggatgtttaaccacatcctcattcccggagataaaaccggtaccgctgcaactgtgacatgtcacgctggtagccgccgaacgggagtaatcagcaaaggcaaactgcgccagcgtcaacatgcatgctccgagcttgtcgccagcggctttgcggacatttttaggagcgtttttgatagcaacctgcgccagcgcctgaactgcgagctgttcatctgttttgctgatgccggacttgccgaagaaagcagccaggccgaagcgtgcacggctgctggtggtaccaatcgccgccataacatcagtgcccgtgagacgatccggagaggttccctttacatcgtcgctgatatgcattccctgaggactaaaatgtttgagtgctgcttccagtttcatgcggccacctgctgttttttatagaaaaccatttcacgaacctgatcgccgttcatgagcatgtcgttaaagtccccgttatccggccagtagatactgaccttatcgaggtcgttttttgccatcaaattggcatgagcacattccatagcagccgctaaaccggtagcactgttgatgtcacggtctgcaaaaatgatgaagttctttacgccagctggcacacggaatttcttcatgaatccgctggtcatggttgcccatgtgtttactttgtagagttgcttgcatgacaaagcggtttcgataccttccgcaatgccaagcgtgctggcgaccgggaacatccggattgcaactgaacgagcgtgatccagatagctctcttcctgaagagatttctggcgttttgcaccaactgaatccttcagctgagctttccgattaccgtccagcaaagttctgtgcagatagcaaagttctcctttgtcatcagtggcgagagaatacagcgactgaaaaaccttccctccgtagcgttccttttcgttaaacctgatagcctcttgaggaagctggtaaatgccgcgcgcattaagataatcagctccagaagatcctcgcagcggcgccagttttgcaaatttgctcagcactcttttacgcaggctgccagcgttgctggttttagggatactttcgcggcggaacgtattaccaatcagctcatcaatttcgcggcaaacctcattaaatggttttccctgggtttgggtcaccagcttgataccatcaccgctaccgcaggtgcagatccatgttccagctccgtcacggtcatcgatacggaatttaccaatcgaatcgcagagcgggcatttccccctaaagtggtttttcccggtgatcggcggcagtccgtaatgctcaaaaatcatggcccaatggccttttgctgcttctaccgttttcatgctctttttcctaactgctgtctgatgtcgctgacgtgtttaagcgcctgctgaactcttgccgggttcggctgctcttctgcctgcttttgcaggcgctgctctttttcacgttgcctagcgaaggcgatcagcttgtgcgtaatgaagtttgaaactgtcggtgtgatatccatggggtaatcactcaggccgttcggccactccccaaagcgnnnnnnnnnnnnnnnnnnnnnnnnnnnnnnnnnnnnnnnnnnnnnnnnnnnnnnnnnnnnnnnnnnnnnnnnnnnnnnnnnnnnnnnnnnnnnnnnnnnnnnnnnnnnnnnnnnnnnnnnnnnnnnnnnnnnnnnnnnnnnnnnnnnnnnnnnnnnnnnnnnnnnnnnnnnnnnnnnnnnnnnnnnnnnnnnnnnnnnnnnnnnnnnnnnnnnnnnnnnnnnnnnnnnnnnnnnnnnnnnnnnnnnnnnnnnnnnnnnnnnnnnnnnnnnnnnnnnnnnnnnnnnnnnnnnnnnnnnnnnnnnnnnnnnnnnnnnnnnnnnnnnnnnnntgatatccatggggtaatcactcaggccgttcggccactccccaaagcgttcacggaaggtgtgagcacaccaggcatcgctgacaggctttttccccatcgatacgcgctggcgctgataaaatttgatctggctccaccaggcctgtttctctgccttggttggctgtcgctgctcgccacccagctttttgagttttcgcccggtgtcggtatcaatgtcctcaccggccagaggtttgtgaccacagttcgggcatacataaacaccagcaggtttcatgaagtggcattgcgaacattcgtgcggcagcttctccgctctttcctcagcggcccggcgcgcgccctcttccatcccgtcagatttgcccgggagatcgtcatattcgatagagtccggataaccgaggcggtgcacagtgccgctgtgatcgaagataaggcaggaatccttgcctggcgccgtgcgcaggcctcgcccgatcgcctgtaaccagcgaatttcgctcttagttggcctggcgtagatgatgcagcgaacatcgctgtcgaacccggccaccagcacgcccacgctgactatgatttttgtggccccagtctcaaagcgatggatgatggtctgtcgctcttcggccggagtgtctgcggtcatcacctcggcattaacaccagcctggttgaactggatggtcagataattggcatgggccacattgacgcagaaagcgattgtcggcagatcccggccattctcaagccagttctggacgatatcgccaaccagcgtggaaccacacatgatctccgccagttgagtctcgttgtagtcggtgccgtactggagagacggagaggttttaacgcccttcagatccggcttagttggcgcgtaaaattcgtatttactaaggtcgccgcgctggatcagctcgccgatggtggttggcttaatcagtcggtcatagtatttgcccaggaacggggaaaatggtgtccccgaaaggccaatcactttcacgcctttttcgcgcaggcgttcgatatccttcagaatgcgtttttttcgcaggtgcgcttcgtcgataatcagcagatcgatattgtcagggaacacgcgacgaataagcgtatcagcgctggcaatttgtattttgagggaaggatcgtagtttgggtgatccgcccagacatagccgatttcatcacccggcaacccgtactccacaaaacgctttgcggtttgggtaatgaggatctggtaaggcgcgcaaaacattacccgcatgccacgactgacgaacccggcaacgatgaaggcggcaagtcctgttttaccactgcccgtcggcgagtacaccatgaaggtttctgtatccttccagttacggcgcagctggttaagggctcgttcctgtgcaaaattaggtgtgatcgtcagctgcattgtgcggaccccgcggtaatgagataataattttgtgatgtggttttcatggattccccctcacatggctggtggcctccccaaaggctgccagcctcccttctgaatcagttcccctgaaaaatcactcttccagaaagaacccttttttctcagcgcctgagcgctttgtactaccttgctgatacaggcgttttttttgtttcgcctttaagacagtgatctacttaaccaatggatctctcctgttggaaaagaccctattcctgcccctgcacccaatcccccccttacccccctttccctctcccccataaaaacgtactacctgcctagtacgaatgaggagttgggtcagttggttgccaacctgaacaggcacctttaagcctgttcttgtccgggtacctttaaacccgcaacaatcaggaacgcgttggcgttccggccaggggaggttcggcggtatacccctgtaaagccctgccgtgatttctcacaaacaggcgaagccgcatatttgcttcatgccttgcccggttctccttgcggtatgaagcgggctcggcttcgaacgattcctgatacacagctgcataacgctgaatggctttttgtcgtgctgctgccgttaggctcagtaactgctgcttgatccattcggcatcggcctggctaaaagccactggcatatcaaccggttgataatcaagtgccatatcactgctctttttctggctttgggaatagctccggtaagtcaggtctgatttgatatgcggcaacttgtccttcagcagcggctacaattcttagaacgtgctctgctttaactttttttccatggcgccatttccatactgttgcctgagagacgccgcaaagcttagccagcgccccctggctacctgcccgccggatggcaatgtcgattggctctgaaatcataaaacccccttagtaattaaatattactttagcgattatgctagttgtaagcaaggtgtctaattactttttgacttaaaaggtcgtttaagctaagtttttaacaacttatggagtaattagaatgaacaacaacacatactcagcccggttagtcgaagcaatgaaagaagctggctttacacaagcatcccttgcaaaagcggtggggatgtctcaatccagcatctggaagcttacttcaggcgcggcgagcggatcacgaaagactgtccagttatcccaggtccttggggttagacctgagtggctttcctcaggtgaaggccccaaatacgtggtagggcttactgaggccgaggagtctatttcacacgagccagcaagagacacctatcgtgtggacgttctggatgttcaagccagcgcaggtcccggaaccttcgtgtcctctgagtttatagagacaataagggctatagagtacaccgaagagcaggcaaggcttatgtttggtaaccgaccagcccatgctatcaaggtcattactgtaaatggcgacagcatggagggaaccattgaccctggtgattttgttttcgtcgatacttcggtcaatcatttcgaaggcgatgggatctatgtctttatttttgggaagactattcatatcaagcgattacaaatgcttaaaacaagtttgatggtcctttctgataacaagctatataactcttgggagattgaggagagcgatgaaggtcagttctacgtccttggcaaagtactaatcaaacaatcagcagaatttaaacgcttcggataaccctctcccaccccactgctcgggccgctttagcggccttttttttatccttacaacacaacaaactaccatagcgattaataaaaaattacttaagtagttgacacctcgtttcatccaggccattctaattacaacctaannnnnnnnnnnnnnnnnnnnnnnnnnnnnnnnnnnnnnnnnnnnnnnnnnnnnnnnnnnnnnnnnnnnnnnnnnnnnnnnnnnnnnnnnnnnnnnnnnnnnnnnnnnnnnnnnnnnnnnnnnnnnnnnnnnnnnnnnnnnnnnnnnnnnnnnnnnnnnnnnnnnnnnnnnnnnnnnnnnnnnnnnnnnnnnnnnnnnnnnnnnnnnnnnnnnnnnnnnnnnnnnnnnnnnnnnnnnnnnnnnnnnnnnnnnnnnnnnnnnnnnnnnnnnnnnnnnnnnnnnnnnnnnnnnnnnnnnnnnnnnnnnnnnnnnnnnnnnnnnnnnnnnnnnnnnnnnnnnnnnnnnnnnnnnncttaagtagttgacacctcgtttcatccaggccattctaattacaacctaagtgattggcggtttaaacaagaggtatcaccctatgaccactagaaatattattcagcttattgatatccctgatttcagatttaccaatcaagatccggatattaactatgctgatgttgcagatgattgtgattcaaaaaccatttcgactatcgaagcaattcgtcatttaagcgaatcgattttcagtatgtctctggaagaagagaaagataatgaaaaaattcgcaatctatcagccattatttatgacttggcagacctggcaattgctactaataaaatctcacaaaccgcaacttatctttctggcgtaaaggatggcactcatggcgcatgaattttctttagaacaagcaaaagaaaaggcccatcaagcagaaataatttgccgcatgatggaagtgtaccctaacaaaatggactgcacagaaattgaagctatagcttcgctacttagcaagttaactggcgatgtatgcgcttggttcatagaagaacaagccataaaatcgaagtaataaaaaaactaattttaaccatttatttcagcttaattgctgtggaatctcacacactttttttgggtgggcattatgagaaataaagacgcctttaagacagcaacgatgatgtgcagcgcaggttattgggatatagcaattttatttttaaaaaaagcttatgggagataatcatgactatacagcaacgccaagacattcagggggttaatatcaaagccgagcaactggctggtctatcgcaaactttatttgaataccacgacaaactggaccatttccaacttaaaactatttgctctcttgtttatgacattgctggcgaaattcatgattggaccgaaaaagaagaggaaattgttatgagcttagaggaggaggctcgccgcaatggataaattaatcgagacatatcgccgccgaattttaaaagcagcgttattacgccaccagcgtaaaacaggcagtaactgccttgttattaaactcaataaaggcggcattaacacggtcgagttaacagagattcttctcgatggattattgagaaaattcgaaaggcttgcgatcagtgagtacgggaatgtcgaaggcgtaaaagctatcaagggaatttacagcagcgctgttgatgttaatggcagcggtgaattccttacggatagcgggaaggagttaatcgacgagcacatttctgagctggttgagttcgtcaaaaaacaaaaagtggaggctccgaaaacggagggtcatgaaatggggggatctgatggcacttacagcgatacgaattcctgagtgggttcacctcaaagcggtacacgttttaagccagttcagggcaaggcgcattcacccctgccgaatgcacggctccgggaatttgagcctcaaagttaaccatcgctggcggctactctcccgcgatggcggaaagaactgggaagtaatgagtcacgaacgatacagcaaagttaaggaccggaaatgaacgataaacgcaccgtaagcatgattgacctggcattacagaaacacgatacgccagttggcccactgttcgtggcagtacgtcacggccgcactaaaaaatgcttcacgcgagatacggcgattcgctatctggctttcttcatgaccaccgaggcttttgagcgttcagggtttccgcagcgtcacccgcgggagcgtattgatcgggctgatatggaggtttggcgagacggtgaaacaaaggctgagtatttggccgcccaccagcgttgtgttcgccgtctgcgtcgtattctggcgcgcaagcgagaaatggaaaaatggtgtgaaaaatgggacgcgatgcacgagcgctacgtcaaagaacgtgacgaactcaaagcaacaaagcctgccggggtacgctgaatgaaaatccaataccaggactatggcgctgtagcaaatatcgttatctccagcaccgtattcgagtaccggaagcataacagggtagttgaaaacactcagtttctggtgccaaccgtagtgagttcacggcacggaactttcatcctgaaaacggttatttcaggtaaaagccgtgatgcattacgcgcttacagaactgcaatcagggaggcggcacgatgaatacagcgtttgaaatatgggtacgtatgcgatacggaaatcgttacgacctgacacgggatattcaggggctttattgccgggaagtggttaagcggatgtttgaagtgtggtgccactgccgtggcctggatgtagtgtgaggtgattatgagcaacgttgttcttctggtaccgaatgactgggttagcgaaaaggttctgattgcggttaccgggctcaagcccggaaccatcacccgcgccagaaaagaatcctggatgctcggccgcgagtacctgcacatttcaccagatggcaatcccaagccttcgagcgaatgcatgtacaacaggaaagccgttgatcagtggatcgaggcgcagaaaaaaaatcaaccaggtgcgaagacagcatgaaaagcagtacactcgtccacgctcctggacgtcaggagggatcaatggctaatgcatcatacccgacaggcgtcgaaaaccatggcggttcgctccgcatctggtttctatataaaggtaaacgtgtcagggaaaacctcggtgtccctgacactgcaaaaaatcgcaagatagctggtgagctgcgttcttcggtttgttttgcgataagaatggggaattttaactatgcagaaaaattcccaaactcaccgaaccttgcccggttcggtcaggatagaaaggaagttactgtgctggagcttagcgaaagatggtcggaactgaagagaatggagatcagctctaataccatgagtaggtacgagtccatcataaaaaatatgcttccgcgcatcggcgaaaataaaatggtttctgcggtgaccactgaagatttgctgtatgtcagaaaggagttgctgacgggtttccatgtaatgaagaaggatcaccggacacaggtaaaaggccggaaatcgtccacggtgaataattacatgatgctgatggccgagatcttccagtttgcagctgataacggctacgcaaaggaaaacccgtttagcggaattaaccgtctcaggaaggcaaaagacgaacctgatccactcacgacagacgagttcatcaggttcattcaggcatgcggacaccagcagatgcgaaacctctggactgttgccgtctataccggaatgaggcatggggaattatgtggtcttgcatgggaagatatcgatctcactgcgggcaccattacggttaagcgtaacctgacccaaacgtatgagttcaccctgccaaaaaccgaggcgggcactgacagggtgatttatctcatacaaccagctattgatgccctgaggaatcaggcccagttgacacgccttggccggcagtttgaggttgaagtgaagctgcgggagtacggacaatctgtcattcaaccctgcactttcgtgttcagccctcaatgcgtcaaacgtggacctcgcacaggatatcactacgcggttaattcgattaataaaatttgggccccgataatcaagcgagccggtattcgttaccgcaacgcgtatcagtcacgacatacctatgcgtgctggtcattatcagctggtgctaacccaaactttatagcaactcagatggggcataccgatgcacagatggtttacaaggtgtatggaaagtggatgtcagagaagagcgccgatcaggtttctctgctcaaccagacgctttcacgctttgccccatcactgccccaaagcatggtaatagcgcagtagaaaacctgaaattcaagtggttagcagtcgtatcgctacatttttataacacggggcacgaaatgctctcgaccataaagtgtgcttatgttgtgatcggggttcaataaatcactaaacagggtatactccggagttgtttattgtactaaacgctcccgtgagaggatgctacagcgcacctatgactcaattcgcttctccggttctgcatacgttgctggataccgacgcgtacaagctgcatatgcagcaagccgtgtttcaccactatcatgatgtccatgttgcggcggaatttcgctgccggggtgacgacttgctgggtatctacgcagattccattcgtgaacaggtcgaggccatgcagcatctggcgctcaccgatgacgaatatcagtggctttcaggcctgcctttctttaaagcggattatctgaactggctgcgtgagttccgctataacccggaacaggtcaccgtcaccaatgataacggcaagctggacattcgtctgaccggcccgtggcgtgaggtgatcatgtgggaagtgccgcttctggccgtgatcagcgagctggcccaccgctatcgctcccctgaaaccggtgtgacgcaggcggttgccgctctggagaataaactcgttgagttttccagactgaccgaagggctggatatgtcccgattccgtctgatggactttggcacgcgccgccgcttctctcgcgaggttcaggaagccattgtcagacgtctgcaacaggagccgtggttcgttggcaccagtaactacgatctggcacgtcgccttgatttaacgcctatgggcacccaggcgcacgaatggttccaggcgcaccagcagatcagccctgaccttgccaacagccagcgcgccgccctcgccgcgtggctagaggaatacccggatcggctgggtattgcccttaccgactgcattaccatggacgcgttcctgcgcgactttggccctgagtttgccgaacgctaccagggtttgcgccatgattccggggacccggttgaatggggtgagaaagccatcgcccattacgaaaaactgggcatcgaccccatgagtaaggtgctggtcttctccgataaccttgacctggcgaaagccgtcgacctttatcgccatttctcatcgcgggtgaacctgagtttcgggattggtacgcggttaacctgtgatattcctcaggtgaaaccgctgaacatcgtcataaaactggtggaatgtaacggtaagccggtcgcgaagctctccgacagtccgggcaaaaccatctgccatgacaaagcgtttgtccgcgcattacgtaaagccttcgatctgcctcaggttaaaaaagccagctaacggcttcgggggagccttcatggctccccttctcttattaatttcttatttcttctcttaagacggtgaaatttacttgtctgatagcggatggcaggtaacatagatatcccccctataagggcggacaagtgtttattttttccgactattaacagagagaatattatgagcgttgtgcctgtagccgacgtactccagggccgtgtcgccgttgaccaggaggtcaccgtgcgcggatgggtgcgtactcgccgagattctaaagctggcatctccttcctcgccgtctatgacggttcctgctttgatcctgtacaggccgtcattaataattctctgcccaattacaatgatgacgttctgcacctgacaaccggctgttccgtgatcgtcaccggtgttgtggtggcctctccgggccagggtcagagctacgaaattcaggcgacctcggtggaagtgaccggctgggttgaagatccggacacctacccgatggctgcgaagcgtcacagcatcgaatatctgcgtgaagtcgcgcacctgcgtccgcgcaccaacctgattggtgcggttgcccgcgtgcgtcatacgctggcgcaggcgctgcatcgtttctttgacgagcagggttacttctgggtttctactccgctgatcacggcttccgataccgaaggcgcaggtgaaatgttccgcgtttcaacgctggatatggaaaacctgccgcgtacgccggaaggtaaagtcgattacgacaaagacttctttggtaaagaagccttcctgacggtttccggccagctcaacggtgaaacctacgcctgtgcgctgtctaagatctacaccttcggcccaaccttccgtgcggaaaactccaacaccagccgtcacctggcggaattctggatgctggagccggaagtggcctttgccgatctaaatgacgcggcagccctggcagaagcgatgctgaaatacgtgtttaaagccgttctcgaagagcgtgcagacgacatgaaattcttcgctgagcgtgtcgataacgacgccatcgcccgtcttgagcgcttcgtctcagcagacttcgcgcaggtggattacaccgacgcggtcgcaatcctggaaaaatgcggtgagaaattcgaaaacccggtttactggggcgtggatctctcctccgagcacgaacgttatctggcagagaagcactttaaagcaccggttgtggtgaaaaactatccgaaagacattaaggcgttctatatgcgccttaacgaagacggtaaaaccgttgccgcgatggatgtcctcgcgccgggcatcggtgagatcatcggtggctcccagcgtgaagagcgcctggatgtgctggacgcgcgtatgcaggagatgggccttaacccggcggactacagctggtatcgcgatctccgtcgctacggcaccgttccacactccggctttggcctgggcttcgaacgtctgattgcttacgtaacaggtgttcagaacgtacgtgatgtgattccgttcccacgcacaccgcgtaacgcaagtttctaaccgaccaaatcattaatggccagcaaatgctggccattattttatcctgcaatgtcagttttcgtcagtcagaagtaagcgtctttaaaccacaaccccgctattacctctacctgttacgttttgtttccacgaaatatcctgagacaaaaaaataaccccattcttattgcgcctaaaacaattcttacgcattagcataaaaaacaatcaatttcacagccatctggatggcttttgtcaatcataagaaaaaatgagccgtttaacttctgtttatacgaaaggcctttagctaaattaaacataaggaaatcatatatataagaataaagcggatgtttaattcgccaggcggcactgaaatttgaggtgcttcacaaagttcccaaaaatacatatttagttacacatattttcttttggtaactgaatcttgaagattgtagcactttcagtgtagcgaaacggttctatgaatggaaagatgcctgtcagacacataaagacacctaactctcatcaatagttccggaaatatttattgacagaatttattggcggcagtggcgagtgtcataaaaaaaccaatgagggtaataaataatgatgaagcgcaatatcctggcagtggtagtccctgccctgctggtagccggtgcagcaaacgctgctgaaatctataacaaagacggcaacaaattagatctttacgggaaagcagttggcctgcattacttctctgattacgcgggcaacgatggcgacaacacttacgcgcgtctgggcttcaaaggtgaaactcagatcaacgatcagctgactggctacggtcagtgggaatacaacttccagggtaacaactctgaaggtggcgatgcacagaacggcaacaaaacccgtctggcattcgcaggtctgaaatttggtgacgcaggctccttcgactacggtcgtaactacggtctggtctatgacgcaatcggcatcaccgatatgctgcctgagttcggcggcgacaccggcgcgagcgataacttcttcgcaggccgtacgggtggtctggcgacttaccgtaacagcaacttcttcggcctggttgacggtctgaactttggtgttcagtacctgggcaaaaatgaacgtgatgacgcagtacgttccaacggtgacggctgggcaacctctctgagctatgatttcgacggtttcggcattgtgggtgcttatggtgcagctgaccgtaccaacaaccagcagacgctggattggggtaaaggcgacaaagctgagcagtgggcaaccggcctgaaatatgacgcgaacaacatctacctggcagctatttatggcgagatgcgtaacgcagcgcgtctgggcagccgtggtttcgctaacaagtctcaggacttctctgtcgtcgctcagtaccagttcgacttcggtctgcgtccatccatcgcttactacaaatctaaagcgaaagacgtagaaggtatcggtgacgaagactacatcaactacatcgacgttggtgcgacatactacttcaacaaaaacatgtctacctatgttgactatcagatcaaccagctgaaagacgacaacaagctgggcatcaacaacgacgatatcgtggctctgggtctggtttaccagttctaatcagcacacctcgttgttatatgcttaatgaacagggcttcggccctgtttttttattcctgagagaaaataatagcgacttttgaaaagccgcacgcttttcgtcgcaaacggttggcattttgtaaatctaccgttaacctgatagcggatttcacttctgtaatcacaatggaacttcgtcatgtttgagaacattactgccgctcctgccgacccaattctgggcctggccgatctgtttcgtgccgacgaccgccctggcaaaatcaacctgggtattggtgtatataaagatgaaaccggcaaaactccggtactgaccagcgtcaaaaaagctgagcagtatctgctggaaaacgaaaccaccaaaaactacctcggtattgatggtatccctgaatttggtcgctgcacccaggagctgctgttcggcaaaggcagcaccattgtgagcgaaaaacgcgcccgcacggcgcagaccccaggcggtaccggcgcactgcgcgtggcggcagatttcctggcgaaaaacacctctgtgaagcgtgtgtgggtaagcaatccaagctggccgaaccacaagagcgtttttaattctgcgggtctggaagtgcgtgaatacgcctactacgacgcggcaaaccacgcgctggatttcgacggtctgctggccagcctgagcgaagcccaggcgggcgatgtggtgctgttccacggctgctgccataacccaaccggtatcgatcctacgcttgaacagtgggaacagctggctaagctgtccgttgaaaaaggctggctgccgctgtttgacttcgcttaccagggctttgcccgtggtctggaagaagatgctgaaggtctgcgcgcattcgccgccgtccatcaggagctgattgtcgcaagctcctattccaagaactttggtctgtataacgagnnnnnnnnnnnnnnnnnnnnnnnnnnnnnnnnnnnnnnnnnnnnnnnnnnnnnnnnnnnnnnnnnnnnnnnnnnnnnnnnnnnnnnnnnnnnnnnnnnnnnnnnnnnnnnnnnnnnnnnnnnnnnnnnnnnnnnnnnnnnnnnnnnnnnnnnnnnnnnnnnnnnnnnnnnnnnnnnnnnnnnnnnnnnnnnnnnnnnnnnnnnnnnnnnnnnnnnnnnnnnnnnnnnnnnnnnnnnnnnnnnnnnnnnnnnnnnnnnnnnnnnnnnnnnnnnnnnnnnnnnnnnnnnnnnnnnnnnnnnnnnnnnnnnnnnnnnnnnnnnnnnnnnnnnnnnnnnnnnnnnnnnnnnnnnnnnnnnnnnnnnnnnnnnnnnnnnnnaaccgtcgatcgcgcattcagccagatgaagtccgtgatccgcgctaactactctaacccaccggcacacggtgcgtctgtggtcgcgacgatcctgagcaacgatgcgctgcgcgcaatctgggaacaagagctgaacgatatgcgtcagcgcattcagcgcatgcgtctgctgtttgtgaacacgctggctgagaaaggcgctgaccgtgacttcagcttcatcatcaagcagaacggcatgttctccttcagcggcctgaccaaagagcaggtgctgcgcctgcgtgaagagtttggcgtgtatgccgttgcctctggccgcgtgaacgttgcaggtatgacgcctgacaacatggcgccgctgtgcgaagccattgtcgcggtgctgtaacctgtacccataaaaaaagcctgcatcgcgcaggcttttttattttaccgggtttaccagacaggcatttcatcctgaaggaacgggttatgcaaccgctcatcgcccagcgtcgacatcggtccgtgtccagggataaacgtcacatcatcacctaacggcaataacttctgcttaatcgactgaatcagctgaccgtgatcgccgcgtgggaaatcactgcgtcctacgccccctttgaaaatcacgtcaccggaaatcagcaggcgcgacacgtcatcaaagaagacaatatggccgggcgtatgcccggggcaatgcaacacctgtaaagttacattccctacgttaacgcgatcgccttcgttcagccagcggtccggtgtcagtggctgacactcatccagaccaaacatacggctttgggcaggtagcccctgaagccagaactcatcttctttttccgggccgataatcggcacaccgtagtgttcagccagttctgccgctgcacccacatggtcgagatggccatgggtgagtaaaatctgcatcagagttacaccgctggcagcgacttcctgcttgattgtctcagcgtcgccaccgggatcaacaagcgcggccagtttagtttgttcacaccagatcaatgaacagttctgtgagaacgcggtaaccggaataatacgatagttcatactgctcctgtgtttcgttattaccagtgccgaaccggcccggtatcaatatgcacaaagttgctacgtgggtagtatcctacaccacctgcgcgcatagataacgccgctttgcgaatattggctaacgaaacgccttcaatatggaaatccatcgcctgccctttggtgtgatagtcttttttcgctaccccacggctgtgggcgcgcagttcattgttggtatccagagagcgatagccagaaatgagttgcaccggccttttggttcccagcagtccctgcaagcggtaaagctgatcgaataatccagggtcgatggctttgattttattcgcgcggaaatcacggaaaaaatggttgagtcttgctaattcatcctgaatatagcctctgccatcgaaaaattccgctttaagcgtctcaccagtatgcagattgttgagcgttaaaatacgcggacgaggtgtcgagagggtggcaaatgctggcgtcggaaggatggctgctgcgcccagcgcaacgccacctaacgccagcaatttgcggcgattagcgtcaaatttgtccatgataatcaggtctacaggtaaaagaaattgtcaatatgcttagcgcacgaagggcaccataactggcaaagcctgctacgtcaaggcgcccaaccccagtgaatacgcggcttgcagccagatcgcctaatattcaccataacttacgacaatcatttttaccgaactacttcatttacctgattaattgttccgcttttggcaaaatttgtgcgccggatcgcgctgtcagatcataattgtaaatatctgtacgatactgggtgcgtccgtccgcgcctacaaacgccgtcagatagtaaagattgaccgggatattgtgacggatattgacgtaacgcgtatccccctgcttcagggcatctgatatccgcgtatcgttccagcctgcatcctgcaacagcatattcgccagctccgaggccttattcacgcgaacgcagcccgagctgagcgcgcgagcgtctttctggaacagattatggttcggggtatcatgcaggtagatagcgtccgaacttggcatattgaatttgtaacgtcccagcgagttatgtgcgcccggtgcctgctggaaacggaacggcaggttcgaaggcgtaatcgttgaccagtcgaccatccagggatcaatcgcttctttgctgttccagccccgcatcaccgtatagttgtgtcgctccagataacccgggtcattccataccttaggcaggatatctttgcgcgccagcgtcggcggcacgttccacggcgggttaaccaccacgttattcagcgcgctgctcatcattggcgtttttcggtcaggtcggccgacaatcacgcgggacgccagcacttcgctaccgtcctgatagtagaccagggagtacgccggaatgttgaccataatgccggtggataacgtgcccggcagcaagcgcaagcgctggatattcaacgccagcacccctgcccgctgggccggagagacgttcagccagtcgcgagtagatggaccaatcacgccgtcagcgccaagcccctgcgcggcctggaactgcttcactgcggcgaccagctcgcgatcgtaagcggcgggcttattgctcaacgcaacggccgttttctcttttaccggcgccgacgggctgacgaccgcattttgcgtctcgtcaccgggcagcgcaattttagggccgctgtcgagaatgccggagcgtttcataatttcgcggatcgcaggcacatcgctgctccactgccccggacgcagcgttgtggtgccacgcagctgaggccacgggcgggaatccgcaaccagctcaagaagcgactgatgcatcgtggcatattgcggatgggcaggcgcaaggcttgcgataaagcgcggcagttcgccgttatccagcgacagctgccactgattaatgacggacagcgcaggcgtcgccagcttgtacggtttactgctgtataaccagcggttgccgttcaccgaaatccccgccacaaactgtaagtagcccatcatggcatcagacaacaccacgtcacgcgcctgtccggaaacggcagggtcggtcaggagctcaacccaggtcgtgaactgcggctgaaagcctgcaatcgccacttcagccagctgctgctggaaggctcgtaccgcctcgcgattttcccacatcggtttcatatcgcgcgcagcgtaaagcagcgtgagctggttaatataagcgggagtatagcccgagggcaggccggtcataagctgctggcgtaatgattcagtatcaatgccttccggcagcggtttaatgccggccatgatggccgtcgccggagactgatccagcggttgtgacagtgacgtcggctgcgcgcccatcgtcgcggagctgtcagtcggtacaatttcaggctcatcggcctgagcggtaaacagtggagcaaacatcactgtcaggcacaaactcagcgcagacagctgacgaccacgatttttcttaagcaacatcccttgccccctgtttttcacgacatgcccattattctggagctttccttcagtatagaaaggcatactcgctgctgccttaccttatgtaaagaagtttaaagataacgcagccctgaacacaagttaagtgaataaaaaaagcggcgcatgagcgccgctatttgtcgcaccccgggttaagaggcgtcagccgtgcccggtaatgactccggtggctgcggggcgaaaccacgcaggcccacgacgtgtacgtgttcactgttctggaacaccttacgcaccagcttataggttgtccctttttccggactgatgttttccggcgccgcgatgatgagctgcatatcgagtcgctcgcaaagctcaaacagcgtggcgatggagcgggcgtcgagacgcgcggcttcatcgaggaacagcagacggcatggcgagatgtctttgccgcgcagacgacgcgcttcatcttcccagctctgcaccaccatcaccagaatcgacataccggtaccgatggcttcaccggtagagagcgcaccggattccgcgcgcagccagccgtctgagccacggttaacctcaacttccatttccagatagttgcggtagtccagcagctcctcgccgatggtttgcggcgtacgctggcccatgtcaatctgcggattcagacgctgatatagcttcgccagcgcttcggagaaggtcaggcggttactgttgaacagatcctgatgctgttcgtgctgttcagacaacacgtccagcagcgtggagtgcgcctcacgcacgttcacgttcagccgcacgctgttgacctggccaaacgacacgctttgcaggccctggttcagctgacggatacggttctgctcgcgctgaatggttttacgaataatattcgccacgctgcgggagctgattgccagcttctgctcgcgggaggtcagctcctccgtcaaacggcccagctcgatctccatctgttcgatcgcttccaccggatcgtcggtacggatgatgtcctgacgaatacgctcgcgtaagtgctgataaaccgccacgaagaactgaattttgcgctcaggacgcttcggatcttcggacatacgcagcacgtcgcgcaggtgttcgttatccgccaccgccagacgcagcgcgcccagcgccttatccgacatagagcgcagttcatcggctgacaggtacgccagctcgcgacgatgcagacgacgttccacgttgttatctttcaccatgcgcatcaccgcgcaccaccccgccttcgcggtcacaacctgttcacgcatctcgtgatagtcacgctccagcttgcgcaggcgtcgcgtcaggttgtccatctctgcttcacagaaggtcagcgctttttccagctgattacgacgcgcgcggttgttactgagctgagcatgcagctcatcgcggcgaatacgcgcccgctcttctgcaccgctgtcggcgcgcacgccgatgccctgcaactctttatgcagatcgtttaacagctctttcttggtgtcgaaggagcttttcagcgaggccatgacctggctgtactggctcagctgtgcggcgtgagtacgcatcgcttcacgggcgcgcgtacgctctgcttcggcctgctcaagacgctggcgcagcttttcattaagatcgctgttcccgctcagcatttctgctgaatcggagtagccgaagtgtgcgcgacgttgcaccacttccgtcagggcaaacgcctgctgacgcgcttcacgctgcacctgctgtgaccaggcgtaatcttcttttaactgctcaaactgttccgggtcgctctggagaacggaaaccatcggctccagttttgccagctgattgccgtgctgctgcacaaagcgcgccgcttcctgcgcttcgtccagacgttcctgaatttcgtctacgcggtcggcgagcgtatcgtccgccagcaggttcaggcgcggcaggatgcggttaagggccgcaacgccctctttcgcctgctcgaactgcacgcggctttgctggttgtcattttcatggctggcaagcgcacgctccagctctccacgacgggtgttgagcttgcgaatttcagcttccggatcgggctcaaaggcaacgcccaggtggctgccgataaagcggctgaacgcctgatgcagacgctgcgttttttgaacatcaaacgacagggttgcaaaacgttcagaaagcgtttcgcgctcagcgtgcaggctttcaatacggttttcacgcgcggcgcggccaaacagcggcagttccgggaagcgcgaatagcgccactggcgatcggcgattttcaccaccaccgctttttccagctcgtcgacgctgaatacgctgtcatcaaacgactgcggatccccttcgatgaggtagagatcttccgggcagtcttccagccctgcaagctggtccgaaatcagcgacagatccggcaccacaatcgcgttacgggatggaccgtacagcgcggagaagtacggcgcatcgtccaggccgacatcgtcgtaaatttcagacagcagcacgccgccgaaacgctcggctaaggcattcaggcgcggatcttctgagccgccaggctggcttaaacgctcgatctcttcatcgacgtcacgcttgcgcgcacccacttcgtcacgctcaacaatcgcttcacgctcgcgctccagcagctgttgcatgtattcggtgacgtcctggctggaggcaaactcctggccacactgttcgctgagctggttcaggctgctttgtgcagccagccagatcggcgcacgctgtaagagcgtcttcgaacgtgactgaagctgttccagctcctgacgcagcgtcatgcgctgttcgctggcgttcgatacggtatccgacagggccgcaatacgcgcttccagctcctggtgcagggcctcaagctcgtcgaaatcgtaatttttaccctgacgcttgcagaattccgccagcagacgctcggcttcctgctgttcacgcagacgctgttccagctcgttcaggcgcatgcgcagcggctgcacctgttcggccagatggcgttgattgacgccgtcgcgcagcagctcacgggcaacgtcccacgcttcgttacgcgccagcggaccgttaatcgccaccaccagctggtacgcctgctcaaactggctatgcgccgtttgcgccacgctcattttctgatcgagagaaagcagtttctcagtggcttcctgctctttggcctggaaggtatccagccattcgtcagcgctttccggggtcaggtccggcaaatggcacagctctttggcacgctgcaacgcctgcaacgcctggttgtactgaatcgcacgcgtctgctgcacatccagcgcctgctggtaatcagcaagctggcttttcagctcatccacttccagctcggcggcttccgcgcgggcttcgttctcttcctgcaattcggcagcttcggccaccacttcattttgctcttcaagacgaatttgcagctcatccagatcggcttcatagcgctcgattttttcctgctgacgcagcgcggtctgtaccaggttcaggtgatcgctggccgcctggtaatcggcttccagatccccttccgcaccgttgtgctcgcccagttcgcgcgccatttcgacatgcttatactgctcagccaccagctgtttgcgggaggtaaacagctcgcggcggtattccagcgcctgatcgagatgaatacggcgctcgttggcgtggcgcatatagtccgccgccacgtagttggtggcttcgctgatcaggtgcttaaacaggtcgcggtcagactgtgtgacgcgaatcgcttccagcgtcatgcggttttcacgcagcgcggcttccatatcctggaaggccttacgcacgccgctgttttccggcagcaggtagtcgcgcagggagcgagtaatggcgctggagataccgccgtacagggaggcttcaatcagacggtagtatttactacgatctgacgcgctgcgcagacgacgggctaccacaccgagatcgaacatcagagagtgatagtcggtaatggagttaaactgcttaaactgcacgccttcgatagcttccagcttgtctttcagctcctggagcgtgaggacgcgcgcctgacgttcattcagggtttccgtcagcagcgcggtcggctgtagggaggttggtagtccctggatcgcaaacggtttgatatctactttacggtcgcggccagcaacctgttgcagacgcacgcctacaaccacgcgctgatggcgggagttgatgacgtccagcactgaataacagacgcccgctttcagcttaccgtgcagacctttatcacgagagccgctcgtggcgcccgcttcagtggtgttacggaagtgcagcagggtcaggtcagggatcagcgccgtcacgaaggccgccatggtggtggatttacccgccccgttaccgccggagagcgttgtcaccagctcatccagatcgaatgttcgggcaaagaagccgttccagttgatcagcgttagtgagcgaaatttaccgcgttcaatcattactcttcctccccgctatccggctgattctcttcgtgctcgtcattgagctgcaaatggttttccaccggcatcgcttcaccgtcacggatcatgcgcagctgcgcttcacgcgcatcgtcacccgcacgcacatcggcgccaaaacggaagaccgattcggtaatacggaacttgctgctgtcgtgacccatgaaccagaccattcccagacggcgcagacggttcagggaagagcgaactttttcctgtaatttctgacggtccagatcggaccccgttgagcggttattcaccagcttgagcagcttgctttcatccgccagcgacagcagctcatcgtaaagctcctgctgggtgaagatcccttcattcgccagacgttccgggctgagatagaggtagcagagaattttgccgaccatcatatccagttcggaaagcaccgagcgcggaataagcgtggtagagcgcggacgcaggtagaaaaaaccttccggcgcgcggatcagctcaacgttatagcgagcgtaaaactcttccaggtactcctgaaagtccatcaaaaaggcgtgattatccagctcgtcaaggccaatgtgacgaccggcacgcagctggctatccagcgccggaaacaacggattcgccagcgcctgtgccagcttaactggcatcacgtgttcaatatttgtcaatgacatgcgcctgtaccttggctccgtaatcgttaatcggctgccacttcggcggcagtccggtgaaatcggcttgtgcgatgcccaggcgcaccgcctggtctacaacaatgcgggcaacatcgaagtggcgcgcgcgcggatactgcgccagatagtcgcgtaccacgaggccaagatccagcggtgcttgtctggttttgtagacagcgagctgttcttcgatcatcgccgcaagctgctcgcgaatttcgttaaattcttcgtattccagatccggcggcagttcaccggtgacctcttcatcacgcagcgccatctcttcgtcgcgcatatccagcagacgatcggcgttggcgtaggtcagcgcccacggcgcatcgaagtaggtctgtaccgactggcgcagacgttgagcaaagacgcgattcttatccatatcgatggcggtacggataaatttatgcacgtggcggtcgtaaccgatccacaggtcgatcgactgctggccccagctgataatgcggtcaagcttgctctgcaaatcaaacaccagacggtcgataaaatgcagatcgtcgtgcgccatcgtcgcgtcctgaatgcgtagcagattggcctgtagcttatctcccgccgcctccagcgtatcctgcaactcacgcagcgtacccgacgtttctgacagcaagagttcacagctggagatggccgcacgccagtctttattaagcagttgagcgatatcgtctttcacctgctgctgctgttcgtccatcagacgttgagtcagatcgatactgtcgaaaatctcggcgaccgaatatttcagcggcgcgtaaacgttgcgatgccagtggaattcgtcaccgttttcatcagccgcgtcggcggcacgcttcagctcacctgcaacaatagagagctgcatggagagacgcagcgtggaaaattcgcgctggcggatgtaatagtcggtaatgccaatgcccagtggcgtaagacgatagatggcgtttccttccgcctgctcgctggtaaagcggttcagcagacgttgacgcaccatatcattgattgcgttgttggcacgcacgctaatggtttcgctggtttgctcaaacgcatcactgacgtggcggaacgcatccaccagttcgccttcactcatttcgccatccaggcgttcgccgtttagcgtcgcaaccgccagcaggaatgagagtctgtctaccggcagcgagatggagaaatcgtttttcctggcccaggcaaccagttcggggactgtctgggaaaattcactcatagattatccttgcatctgcggcttgcgcgcggtgacgtgtatatagcggccaaggctcagataaggctcctggcggcagtaccgcgtctctatttctgttaaggcgtctaaacagtcatcctgtttttgtttatcacgcagataatcatgaaacaccctcacgccggttttgccggtaatttcccaaccgatctcctccagccagccatagacctgctgcggttcacgagggaaatccggtgaaagcgtgcgtcgtttctttttatacatgccctgctgtacatagccaaaattgccgaccagcacgtttcgcattagcaggccgttggcattgtaaaacatcagcgataacgcaccgcccgggcgcaacatcgaccacagcgtttttaacatcgcttgtggttcggcgatccattcgagcacagcatgaaacaatatcagatcaacctgcgtttccaaatgctgcggaatgtcctgagcggcgcaatgtataaaatgcatgttgtcgctcacacctttctcttctgccgctcgccctgcgcgcgcaaccatctcggcagaaagatcgcaaagcgtgacgtgatgtccccgctgcgccatcagaattgcagtctgaccttccccaccgccggcatccagcacgcgcaacggtcggtcaccgaattcagccagcagcttgtccagatcctgccagaggatcgtctgacgaagctgacctttggtggtgccataaatgttgcgcgaaaacttttccgcgatgtcatcaaaattgcgatcccgcattgggagggttccactcactgcaaaaccgctattttgtcacacccgcgcggagaatgaaccactctggtgtaatatcaccgacaatcgcctgctgtatggttaaaaaaggaaccaaaaaggatgctttttaccctaaaaaaatatatcggaggcatgatgcttccccttcccctgctgttgcttctcatcgcgctggggctggcattgatatggtttagccgctttcagaaaagcggtaaatccctcgttaccgtgggctggctggcgctgctgttactcagcctgcaaccggtcgctgacggtttattacgtccgattgaaaacacctacccgacatggcagggaaatcagaaggtgggctatatcgtggtgctgggcggcggatatacctgggatccgaactgggcgcccagctcgaacctgatcaacaacagcctgccgcgcctgaacgaggggatccgcctgtggctggccaatcctggatcgaagatgatcttcacgggcgctgcggcaaaaaccaacccggtcagtaccgctgaagcaggagcaagagtggctgaatcgcttggcgtaccacgttccgccatcatcacgctggacagcccaaaagataccgaagaagaggcggcggcggtgaaacaggccatcggtgatgtaccgttcctgctggtgacctctgcttcacacctgccgcgcgcaatgattttctttgagaagcagggcctgcatccgcttcctgctccggcaaaccagatggctattgacgccccgctcaatccgtgggaacggataatcccgtccccggtatggctgatgcacagcgatcgtgtcggctacgagacgcttggccgcctctggcagtggctcaaaggttcgtcaggcaagccagggcaggagtgattttgcggccagatcgaaactggcgcgattaaagcgcccggtgttgaccagctgcgccacctcatcccagagaagatagagccagcgtcgccagagaaaggcctccgcaacgggggcgcgctgaagatagtgccagaacaaatcttccgccgccccgccctcgctcagcctgaacagttcgtactcgcgcggcgcccagagcatgatccccggcccgaccnnnnnnnnnnnnnnnnnnnnnnnnnnnnnnnnnnnnnnnnnnnnnnnnnnnnnnnnnnnnnnnnnnnnnnnnnnnnnnnnnnnnnnnnnnnnnnnnnnnnnnnnnnnnnnnnnnnnnnnnnnnnnnnnnnnnnnnnnnnnnnnnnnnnnnnnnnnnnnnnnnnnnnnnnnnnnnnnnnnnnnnnnnnnnnnnnnnnnnnnnnnnnnnnnnnnnnnnnnnnnnnnnnnnnnnnnnnnnnnnnnnnnnnnnnnnnnnnnnnnnnnnnnnnnnnnnnnnnnnnnnnnnnnnnnnaccagcacgcagttgtcgttaaaaccctcaaacagcgtcggcagacactcccgggtgcggaataaaatacgtttgtcctgcatcgttaaaccggtgttgttgaactggttcagcgtgccccacagcacttcaacacgctggcgataccacagcggccacaggttttcctgcgtgctgtccaccgcgccaacaagaccccggctgtcctgccgatgccaggcaagcagagcctcgacaatctgatctttcagctgttcccagcgctccggtgtacgcgtcggggcttcaacagaaaccccgcgtaaacgctcgataagcagaacatccgggccgggatgctcctcatgggtcatcacgccgtagaccgtcggcatgcggacagtcccttcccgcgccagcatcgacattttccaggccagctgtctggcgacgccaggcgaggtaaaacttctggccatcagcggcatggggtttccctgactgtcgtacaacgaccagagtgcggtatcggccttttcattcacgcattccacccggcttagcttttcaccaaggagatggctgagttcagcacgcagctgttccatatgagattacccccattaagactactgcttttataatgagcgcgcgaaacccggatgtcacccggtagagatcaataatgaaaaagaaaaggaaaatagccaggcgggagaacatccccccagacgaggggatgccagcgaattaacgcatttcgacgcgtacgcgctcgagatcttcaggggtatccacgccggtgcctgggatttcctgggcaaccgcaacgtgaattttctcgccgtaccacagcacgcgaagctgttcgagcatttcaatatgctccagcgggcttggtgcccaggcgacgtagcgacgaataaagccggcgcggtagccgtaaataccgatgtggcgcaggaaggtttcgccgattgtctctttcgattgcgcgaaacgatcgcgatcccacggaatggtggcgcgggagaaatagagcgcgtagccctctgcgtccatgaccactttcaccgcattcggattgaacgcctcttcagcgtggtgaatcggcaccgcgagggtcgccatcccgacctgacgctgtgccaggttgtcggccacctgacggataatcgccgccgggatcatcggctcatcgccctgcacgttcacaatcaccgtctcgtcgctgaaaccgcatttttcgacgacttccgccaggcgctcggtgcctgactgatgatcggcacgggtcatgcacacttccccacccgcggcctcaaccgcgcgcgcaacatccgggtgatcggtggcgacgatgacgcgtccggcgcccgattcgcgtgcccgttcaaggacatgcacaatcatcggtttgccattgatatccaccagcggtttacctggcaggcgcgttgaagcataacgcgcagggataatgacaacaaaactcatggtttgatctcttctgccaccagggaacgggcttcattttccagcaggaccggaataccgtcacgcagcgggaacgccaggctgtccagtttgcaaatcagctcttgtttatcctggctgtaatacagtttgccgttgcacaccgggcaggcaataatttcaagtaaacggtgatccatagttcctccgtatgggtaatcgctaaagcttatcacattcccttttcagggagtgcctgtttcccagccacctcgacaggtcgtaaacagccccgcaggcacgcgaccgagtacaatttcatgcgccccctgccagcgggcaaattcactgagcgcagtcgttaaccctttttccaggccagccgtcacctttatgccctcttcaagccagagcgcgataatttcaagcatgccggttttacggtgcattttagcgtccatgcgcccgactagctggcctttgtgcagcagcggcaaaacaaaataaccatactgccgtctgggcgccggagtgtagcattccagacggtagctgaaattaaacaactgcccggcccgctttctgtcccagacaacggggtcgaacggcgacagcacggcactgtgggtcgcctggagtttgccctcctgcgcctgcgccagcagagggaacaaatccgcatgcaaccacatttcacctaacgactctaccgagaccggcatgacgcgctgttcgcgctgccacgattccagcagtggttttagctgcggctgacgcagacgataataatccgccagccactgtgggcggaagatgccaaggctgcgggcgctgttcccgagcatgatggcttcggctgcgtcctgagacagcaggtcacgcgtatcgtcccagtgaggcataacacggtgcgtgaggtcatagacgcgctgaaagttgcggcgctcgaccaccatcactttgcccgacgtaaacagcccttcaagatggcgtttgtgcggtttccactcccaccatccgcttgcgccttttcgcgggtgttcaaaatccgcagagcgtaccggcccgttttcctgaatatgggcaatcagttgctctatttcatccgcgtgttccaccatccactcctgacggtatttccagcccattttgtccggggcgagcatgcggtgacgcatcagggcaaaatcgcttcgcgggagaaaacaggcttcatgcgcccagtattccatcagttcgccctgacttagcgcattatccagccactgcggaggatagtttcccaggcggctaaacaggaccagatacgggctacgcgccacgatgttaatggtgtcgatttgcagcaacgacatgcgttgcacggtagagaggatatcagctggctgcgcgcggcggcggggctttttcagaagcccctgggcggcaagatgcaggtttcgtgcggctgcaagtgagaattgcggtagagacatgcgttttcctgtcagtcaaagcgccaccggaaccgcgtagaagttactgcactaacgcgagcagttccttgagcaaatgttccggctgttcgccgctgagttcagcgtcaaccggcagataccaccagttttctttcgcaaaggcccggcattttaccgcgtctttttccgtcatgatcagcgtctgtcccggcgctgccagcctttcaacctcttcggcaactaacgcctggtgatcggcgagcggcacccgtttatcaagctttgcgccgcactgctccagcgttgcgaagaaacgcggcggatgacctataccggccatcgcaaccagatgttccagttgcgcgacgtctttacgcacgccggtcaacatattcacggcctgtccgggacgaagatgcatcgggatttcgcccgctctggcttcaccaccgtttacaatcacagcatcgacgctcttcaggcgcgacgcacgctcacgcattggaccggctggcagccaccagccgttgccaaaacgccgcacgccgtcaatgaccacgatctctttgtcacgcgccagcgcgtaatgctgcaaaccatcatcggtaataacgatttgtacgtcatgctccgcaagcagtgccttcacggcatcactgcgcaccggcgataccgcaaccggcgcgccggtacgctggtaaatcagtaccggctcatcaccggcttcagcggttgtcgtagctgggctcagcaccagtggatactgcgccgctttaccaccgtaaccgcgtgagacaactcccgggcggataccgcgtttatggagctgttctaccagccagatcaccaccggggttttgccgtttccacccgccgtcaggttgccgaccaccaccaccggtaccggtgcgcgccaggcgcgcttgatcccgaggcggtaaagcagacgaatagcaccgctcaccaggccatacagccaggagagcgggagaagcagcacccacagaggggattcccccgaccagatgcgtgcaatcattgaccgaactgcattttatgaagctgcgcgtaaacaccacgctgttccagcaggtccgcatggctgccgcgttcaacgatcacgccatcttccaccaccacgatttcgtcagcctgttcgatggtcgacagacggtgcgcaataaccagcgaggtacggtttttctgtaattcatccagagcagactggatagcgcgttcagattccgtatccagtgcggacgttgcttcatcgaggatcagaatcgggctgttgcgcagcagcgcacgggcaatcgcgatacgctgacgctgaccacctgagagcagcaccccgttttcgccaatgatcgtatccagaccgttatccattttgttaatgaagtccatcgcataggccatacgcgccgcattctcaatctcttcacggctgtactcttcggtacgggcatacgcaatgttgttcgccactgtatcgttgaacagatgcacgttctgcgagaccagcgcgacctggttacgcagcgactggagggtatattcccgcaggtcgtgaccatcaagcaggatctcgccctggtcgatatcgtagaaacgggtaatcaggctggcaatggtcgacttgcccgaaccggaacgaccgaccagcgcaacggttttacccgccgggatggacaggctgatatcacgcagcgccggcacttcgcggcctggataggtaaaggtgacgttacggaattccaggtcgcctttagcgcgctcgatcacgcgtgtaccttcatctttttcctgttcggaatcgaggatgctgaacagcgtctgacaggctgccatcccgcgctggaactgggcgttgacgttagtcagcgatttcagcggacgcatcagcgcaatcatggatgagaacaccaccgtaatggtacccgcagtcagggtttccatgacgctcgggaaactggcggcatacaggacgaaggccagggccagagaggcaatcagctgaatgatcggatcggaaatcgacgaggccgataccattttcattccttgcaggcgcattctgttgctgaccttgtcaaagcgtttggtttcgacttcctgaccgccgaaaatcaacacttccttatggcctttcagcatctgctcggcgctggtagtcacctgccccatcgtattctgcatatttttactgatgttgcgaaaacgctttgataccacgcggatcgcgatggagacaatcggcgccagcacaataaggatcagcgacagttgccagctgtaatagaacatcatcgcgaacaggccgatgatggatgcgccttcacgcacaacggtaatcagtgcgctggaagaggacgacgccacctgctctgaatcgtaggtaatacgcgacagcagggtgccggttgactgtttgtcaaagaatgagaccggcatccccatcatatggctgaacagccggcggcgcatggtcatcaccactttaccggatacccaggagatgcagtagctggatacatagctggagattccgcgtaagatcatcagcccaataaccaccagcggcatccatagcagcactgaacgatccgttttaccgaaaccgtcatccagtaacggtttgagaagcgataacataaacgtatcgctggctgcgttgaggattaacgctacgcccgccacgatcaagcctgctttgaaaggagcaatcatcggccagagccggcggaacgtttgccacgtggagagatctttgtcgttatgcattcaaaaaaccagcatttgttgaaatagccgcatattctacccgttatctacgggcgcgccaaaccactgatgataccaacgcggtaaatagtgttcgcgtaagcgacgaatttgccgactatggtgcgaaaaggtcacagatatctgcccggaatgcggggtatcaagccagagatatccctccgttcgatagcgccggaccactttaatagaagggaaacgccacgcgttatagcgagccatcgaggccaacgaaacctgcccctctacgcgctgtagcaacggtgttgaagatgacgtgttacttccatgatgtggcacctggatcagtgtagacgcaagctgacgccagcgatggcttagcattgccagttctgcctgcgcttcaatgtctccggtcagtaaaacgctctgttcgccgtcatcgatttttaccacacaggagcggttgttacctttcgccgaggtgttttcgggtggccagtgcacggagaacgttaaaccctgccactgccatcgctgtcctcgaaagcacggaagatgtccggaccaggataaggggctcctgatccacattgcgggccaggcagcttttagcgatgccagtccccccgcgtggtcgagatgttcatggctcaggatcaccccttccggtctcagatgatgccagcgtagccaggggataatcagctgttgcgcactgtccccaccgggccatgccagcccggtgtcatacagaatggccttgccgtgacgctcaatgaccatcgccagcccctgccctacatccagcatatgcagggaccagctgtctgttttaaccctgtgccagaggggaaaggccagcaccacgctgcctgccagacagactgcgggtgctgcgctgaaggccctgaatcgccagccaatgaccagcagccacggcagtaacgtcaggtattgccagcgttcatcaacgtcctgccagccattcggtaaacgcatcaatagccagaaaagccctgccagagatttatcagtagccagccagacgatactttccagcacagcgaccggaaacagatgcagaaacatgccgagcaggatcaacggaactgagataaacgtgaccagaggaacggcaaacaggttcgccaccagcgaggagaggctgaaaccatggaaaatcaggacctgaagcggcaacagaagcagcagcattccgacctgcaaatacaacagcgtaaccagcggccgcaggcaccggccacgttgccagtgcgggagaggcaaccactgataccaaaaaataagcgcggcgaccgcaaacgctgacaacgccaggctttgtgacaggaccgccagtggatcgaaaaccaagatcgccgccacgcaggtaagccatacctgccagggcgaccactggtgaccgctcatttttaatgcagccagtaccacaagcgcgataaccgtgcgcagcgcgggcggctgcaagcccgttagccatgcgtaaaacgcggcaaaaatcagccctgccagcaaggggatttgccagataatccagcggcccggcaggaagaactggatgccccgcgccagaaaccagatgacagaagcggccagcgcaatatgtaatcccgagattgccatcagatgcatcgttccggtatcacgcatcaggttttttatctcccgcgagaccgacagccgctcccccatccccagccccaggatcacgggtccccactgatatgctgaaagagtattctgtagtgatgtcaggtattgcgcacgcagactacagccttcgtcaacgagcgccgcatgggtaaaccgtccactcagcgtctggtgtcgggcaaaggcatttttctgtgaatcatagccgccatcgttgagttctccgtgtaccgccctgagccgcagggtcattgcccagcgttgacccacgcagacgttttgcggcagatagttgccatacagcgccacgcccatggcagcccatacgcgttctccattgaggctgacaatctttccctgatgcatcgttgcgccgtccgttgcggtaatgaccacctcggcctgctgcggtgcttgcgttaaatagttcatcggccacacgctttcctgagcggccaggatcccccagcacataaaaagcaatgcgagtcctgaaaacctgagccattttctctgctgtacggataacgcaattcctgcggcaatcagcaaccagacaagatgcaaatctggcaaaacgggtaaccaatagagcgggattatggccagaatggcgcacatactgataacgtggatccccatcttcacctccatgtttcaggcgattatgcggcgggactgatgcgtcgtcagacagaaaaaacgtgatttacagcgggcgctgcaacctttttaagcgtttacagcaaagagaaaatttaaatgcggcgcgtattcagaaatgcaggggcgggatacaaaaaaagcaccctaaggtgctttctttaaactcagtttaaccctgatgattaaactcagttaccgtaaatattggcgcgatcgcgcagttctttacccggcttaaagtgcggaacatactttccttccagctccactttatcgccagtcttcgggttacgcccggtacgtggtgcacgatagtgcagagaaaaactaccgaaaccgcggatttcaatgcgctcgccctgggcaagagtggtagccatatgctccagcatctctttaacggcatcttccacagccttggcagggatatgcggttgctgactggcaagtctttcaatcaattctgacttggtcatgattcctccggttcctttcaaacccattagctgaacagcttattaaacaagggcggccgtagccgccctttgttattgattacaggacgaatcctgcaatctgtcaagtctgctctccatccttcgcgctgtaaatgcgttacagctcaaatgatggtgcgaacctgaacttactcgcctttagctgctttgaaagcttcagccattgcgttgttagagaagtttgcatcttcctgtttgttcacagttgcgattgcatctttctcatcagcttcgtctttagcacgaacagacaggctgattgcacggttcttacggtcaacaccggtaaacttagcttcaacgtcgtcaccaacgctcagaaccagagttgcatcttcaacgcggtcacgtgaagcttcggaagcgcgcaggtaaccttcaacgccgtcagccagttctacggttgcgcctttagcgtcaacagcagtcactttaccgtttacgattgcgcctttcttgttcagtgcaacccagttgttgaacggatcttctgcgagctgtttaacacccagggagatacgctcacgctctgcgtcaacttgcagaacaactgctgcgatttcgtcgccttttttgtattcacgaactgcttcttcgcctgcaacgttccaggagatgtcagacaggtgaaccaggccatcgatgccgccgtccaggccgatgaagataccgaagtcagtgatagacttgattttaccttcaacacggtcgcccttgttgtgggtttccgcgaactgctgccatgggttgtttttgcattgcttcaggcccagggagatacgacgacgttcttcgtcgatatccagaaccatcacttccactacatcaccaacgttaacaactttggatgggtggatgtttttgttggtccagtccatttcggaaacgtgcaccagaccttcaacgccttcttcgatttcaacgaagcagccgtagtcagtcaggttggtaacgcgaccagtcagtttagtaccttctgggtaacgcttagcgatagctacccatggatcttcgcccagctgtttcaggccgagggatacacgagtacgctcgcggtcgaacttcagcactttaacagtgatttcgtcgcccacgttcacgatttcgcttgggtgcttaacgcgtttccacgccatgtcggtgatgtgcagcaggccatcaacgccgcccaggtcaacgaatgcgccgtagtcagtgaggttcttaacgatacctttgacttccatgccttcctgcaggttttccagcagctgatcgcgttctgcgctgttttcggattcgataacggcacgacgggaaacaacaacgttgttacgcttctggtccagcttgattactttgaactcaagctctttgccttcgaggtgcagggtgtcacggactggacgaacgtctaccagagaacctggcaggaacgcacgaataccattcagctcaacagtgaagccacctttaactttgccgttgataacaccgaccacagtttcagcttcttcgtaagctttttccagcgtgatccatgcttcgtgacgtttagctttctcacgagacagcagggtttcgccgaagccgtcttctactgcgtccagagcaacgtcaacttcgtcaccaacctggatttccagctcgccctgggcgtttttgaactgctcagccgggatggcagactcagatttcagaccggcgtcaaccagtacaacgtctttgtcgatagcaacaacaacgccacgaacgatggaacccggacgggtttcgatttcttttaaggattcttcaaacagttgagcaaaagattcagtcatgtttaatcttcaggttaatattaacgtccacctggctccgtgccggatggggttgtttcacatacccgccgtcaatccattgcagcgggggtactgctaaatcggtcgcgattacgcgagtgccagtttttggcgcgcatattgtagcgctttttcaatcacttgctcaatagttaaactggttgaatccagcactaatgcgtcttgcgcgggaacaagtggtgcgacggcgcggttacgatcgcggtcatcgcgctcttttatctcggataaaaggcgatcaaagttaacactaaaccccttttcctgcaactgaagcatgcggcgttgagcacgttcttctgaagaggcgtcaaggaaaattttcactggcgcatcggggaataccacggttcccatgtcgcggccgtcggcgatcagccccggcgcttcacggaaaccgcgctggcgacgtaacagcgcttcacgaacgcgtgggaaagccgccacctgagaggccgcattggccacttcctgggtacggatttcaccgctgacatcttccccttccaggatcacttcaaggttgccatcggtcgagacaaagcgcacatccagatgcgcagccagcggtaccagcgcttcttcagacgcaacatccacatgatgatgcagcgcagccagcgccagcacgcgatagattgctcccgaatctaaaagatgccattgcaatgcttccgccatcgctttgcacagagtacctttccctgcgccacttggcccatcaatggtgattaccggggcaattgccgtcatctttttctccttaattaaggcataccgtttacatgaacgccgcgcattatacgcgccaacgtgcgcaactgttacctttgcgtgcaaattacggaatgattgaagcagagtgtagaagaaatgaaagaggatgagtgtcagaaagcgtaaggaaatgccgcatcaggtgatgcggcatacgatcatcaggccagggtgctaatgcgcgccagctgttcgaagtagtccgggaacgtttttgccgtacacttcggatcaaggatagtgactggcgtatctgacaacgccaccagcgagaaacacatcgccatgcggtgatcgttgtaggtgccaatttctgcaaattgcagttttgccggcggcgtgacgcgaatgtagtcttcgccctcttctacctcggcccccactttacgcagctcggttgccatcgcgaacaggcggtccgtctctttcacacgccagttgtaaatgtttcgcagcgtggtggtgcctttcgcaaacagcgcagcggtggcaatggtcatcgccgcatccggaatatggttcatatccatatcgatggcgttcagctcaccgtgggtgcaggagatgaagtcatcgccccaggtcaccaccgcgcccattttttccagcacgtcagcaaaacggatatcgccctgcacgctgttgcggccaatgcccgtcactttaaccgtaccgcctttaatcgcgcctgcggcaaggaaataggaggcggatgaagcatcgccttcaaccaggtagtggcccggggactgatactgctgcgctccgcgcaccacgaaacgctgataagactggttttccacctcaacaccaaaggtgttcatcaggtgcagggtgatatcaatgtacggcttagaaaccaggtcgcctttaatgctgatgacggtgtcctgtggtgccagcggtgcggtcatcagcagcgcagtcaggaactggctggaaacgctaccgtcaacctcaacattaccgccagtgaatcccccgcgcagacgcaggggcgggtaattttcctgctcaagataatcaatctgcgcgccgccctgacgcagggcatccaccagatggccgatcggacgctctttcattcgcggctcaccggtcagcacaatatcgttactccccagacacagcgcagcggccagaggacgcatcgcggtaccggcgttacccaggaaaagctccagcgcttcagcagaatgtaacgcgccgccgttaccggtgacttcacaacgggtacgatcgtcagacagcgcgtactgaacgcccaacgctttcagtgcattgagcatatggcgcacgtcatcgctgtccagcagattagtgaggacggtggtgccgtttgccagagctgccagcagcagagcgcggttcgagacactttttgaaccaggcagattaatggtgccatctacccgcgcgataggttgtaacgtcagggattccatgaaactcaactctcaactcaacataataaaaaccccgcaggaacgctgcgggggtgaaaaacagccaattaaccgtgacgacgttcgaagtcgatcatgaaatcagtcagggctttaacgccttccagcggcatggcgttatagatagaggcgcgcattccgcctaccacacggtggcctttcagcgcatgcagacccgccgcgaaggactcttccaggaacacgttatccaggttgctgtccgccagctggaacggcacgttcatgcgcgaacggttagttttggcgacatcgttacggtagaaatcgctcttgtcgatcacgccgtacagcagttcagccttttgctgattgatcttatccatctgcgccacaccgcctttttgcttcagccatttgaagaccaggccggagagataccaggcaaacgttggtggggtgttgaacatggaatcgttgtcgttcaggacggtgtaatccagaattgacgggcaagacttatgggctttccccagcaggtcttcacgcacaataacgatagtcagacccgcaggaccgatgtttttctgggcacccgcgtagatgacgccgtagcggctgacatccagcggggtggacagaatggttgaagagagatccgccgtcacaatgacattttcgccaaagtctggctcttcgtgaatggcaataccgtcgatggtttcgttcgggcagtagtgaagatacgcggcgttgtcagaaagctgccactcactcatcggcttcacggcgcgcagaccgtcaacggtcactttggcatcgatgacattcggcgtgcaatatttgtgcgcttcttttaccgcactggccgcccagtagccggcatcaacgtaatcagcggtggttttgtcgcccagcagattgagcgggatacccgcaaactggccgcgtccaccgccgtgacagaacaatactttgtagttcgagggaatgttcagcagatcgcgaaaatccttttctgcttcttccgccacctgaataaacgctttaccccggtggctgacttccatcaccgacgtacccagaccgttccagtcacacagctcctgttgagcctgtttgagcacgtctgccggtaacattgccggacctgaactgaaattaaagacttgagccatttcccctcaccacgctaaaagccataagttataactgtggatatcggttttatcattcagtgacacgcgccgcaatgtctaaaactgatggccgaagaaatgtgcccctcgtcacacaatacaatctgccgtaccgttgtcacaaaaccgacaaaatcgctgtcaggtgttacgtttagcccggctaaccttcgtccattctggattcgtacagcgggggcataattgatgttcgcccgcctgcataaccacgacatgactacattttatgcaggcgtactcgcccgcttcaggtacagttttgtatcgctctatgagcatatccggcaggatgcacaggccgggcttcacctcatcgtcggaatagtaatagacgctgatttgaccattcgtttccataatcgccagacgcacctgccccagttgctcaacgctgctcaaacggagttccataaagaactcaaactccgtcatattggcgctttgcacattctaccaggccagttgaccatcttcgacaatcaccaccggcttcccttcgagcagatcttccagtttctcacttttcgacatcagccacatgaccagccggtacagcagtgcaagcgtcacgaagacgataaagaccggcaccatcggcacatcgtcataaaaggcaacgtcccctgccgccgaccccagcgtcaggatgatcagcacttcaaacagcgacatctgccgcacgccgcgacgtccggtgattttcagaaacaggaaaacgagtacaaaggtgtacaggctgcgcagcgctacttcgcctaaaaactcaggagggactttatcaaacgccatccgctggagatcgaaagctttcattttttatgccttaacagtaggttactgcttataagcatagtccagccatttattttcgccggagatagcacccgtcacgcaaaacccgtatcattgcgcgctttacgtacgataaaagtgaacgccatgactcaaacgtttatccccggcaaagacgccgctctggaagattccatcgctcgcttccagcagaaactgaccgacctgggctttaatatcgaagaagcctcctggctgaatccggtgcctcacgtctggtccgtgcatattcgcgacaaagactgtgcgctgtgctttaccaacggtaaaggcgcgaccaaaaaagcggcgctggcctctgcgctgggtgagtattttgagcgtctgtccaccaactacttcttcgccgacttctggctgggcgaaaccattgccaacggtccgttcgttcactatccgaacgaaaaatggttcccgctgaccgaaaacgatgaactgccggaaggcattctcgatgcccgcctgcgcgcgttctacgatccggaaaacgaactgaccggcagcatgttgatcgacctgcaatccggcaatgaggatcgtgggatctgcgccctgccgtttacccgtcagtctgacgagcagaccgtttatatcccgatgaacatcgtcggcaacctgtatgtgtctaacggcatgtctgccggtaatacccgcaacgaagcgcgcgtgcagggattgtctgaagttttcgagcgtcatatcaaaaaccgcattattgctgaatccatcagcctgccggagatcccggctgacgtgctggcgcgctacccgggcgtggtggaatccatcgccaaactggaagcagaaggtttcccaatctttgcttatgacggctctctgggcggcaaatatccggttatctgcgtggtactgttcaacccggcaaatggcacctgtttcgcctccttcggcgcgcacccggacttcggcgtggcgttggagcgtaccgtaaccgaactgctgcagggtcgtagcctgaaagatctcgatgtctttactccgccaacctttgatgacgaagaagtcgccgagcacaccaacctcgaaacgcacttcatcgactccagcggtttgatctcctgggatatgttcaaacaggacgcggactatccgttcgtggactggagctttgccggtacgacggaagaagaattcgccaccctgatggcgatcttcaacgcggaagatcaggaagtctacattgccgactatgaacacctcggtgtttacgcgtgccgtattattgtgccaggtatgtcggacatttatccggcagaagatttatggctggcgaacaacagcatgggcgcacatctgcgtgaaaccctgctggccctgccaggcagcgagtgggataaagaagattatctgaacctgatcgcccagctggacgaagaaggacacgatgatttcacccgcgtgcgcgaactgctgggtctggcgaccggaaaagataacggctggtacaccctgcgcatcggcgagctgaaagcgatgctggcgctggcgggcggcgatctggatcaggctttggcctggaccgagtggacgatggagtttaaccagtccgtcttctccgccgagcgcacaaactattaccgttgcctgcaaacgctactcctgctttctcaggaagacgaccgcgagccattgcagtatctgaacgcctttgtacgtatgtacggtgcggatgccgttgaagctgccagcgcggcgttgagcggtgaagaaccattctacggcctgcaagcggttgacaacgatctgaaagccttcccggcgcatcagtcactgctgaatgcgtatgaaaaattgcagaaggcaaaagccgcttactggtcaaaataagcgcatataacattaatggctgtaggcgtattcaatcgcctgagctatattacggggcaatttcattgcccctttttttttatttttccgcaatgacgtttaattgtaataattaagttaaccacgggtaaatataaaaacgcttacctgagctttactgttactaattataataaatactccattttaattaactgttccacgggaggctgaaggaaaaaattcaactcttttcataacttttaaaatttatttttatacggataatcaaatacttactnnnnnnnnnnnnnnnnnnnnnnnnnnnnnnnnnnnnnnnnnnnnnnnnnnnnnnnnnnnnnnnnnnnnnnnnnnnnnnnnnnnnnnnnnnnnnnnnnnnnnnnnnnnnnnnnnnnnnnnnnnnnnnnnnnnnnnnnnnnnnnnnnnnnnnnnnnnnnnnnnnnnnnnnnnnnnnnnnnnnnnnnnnnnnnnnnnnnnnnnnnnnnnnnnnnnnnnnnnnnnnnnnnnnnnnnnnnnnnnnnnnnnnnnnnnnnnnnnnnnnnnnnnnnnnnnnnnnnnnnnnnnnnnnnnnnnnnnnnnnnnnnnnnnnnnnnnnnnnnnnnnnnnnnnnnnnnnnnnnnnnnnnnnnnnnnnnnnnnnnnnnnnnnnnnnnnnnnnnnnnnnnnnnnnnnnnnnnnnnnnnnnnnnttctggccattacggctggggtgttcatctccatcgctttcgtcttctatatcacagccaccaccggcactgccgggatgcctttcggcatagcgaaactgattggtggtatttgcttctcactgggcctgattctctgcgtcatctgcggcgccgacctcttcacctcaacggtgctgattgtggtggcaaaagccagcggaagaattacctggggtcaactggggcgcaactggctcaacgtttacgttggcaacctgattggctgtctgctctttgttctgttgatgtggctctctggcgagtatatgaccgccaacggcggttgggggcttaacgtcctgcaaaccgccgaccacaaaatgcaccatacatttatcgaagctgttgctctcggcatcctcgcaaacctgatggtctgcctggcggtctggatgagctactctggtcgtagcctgatggataaagccatgattatggttctgccggttgcgatgtttgttgccagcggctttgagcacagtattgcgaatatgttcatgatcccgatggggattgttatccgcaactttgcaagcccggagttctggactgctgtaggttcaaccccggaaagtttttcacacctgactattatgaacttcattactgataacctgatccccgtcactatcgggaacattatcggtgggggtctgttagttgggttgacatactgggtcatttacctgcgtggcggcgatcatcattaatggttgtctcaggcagtaaataaaaaatccacttaagaaggtaggtgttacatgtccgagcttaatgaaaagttagccacagcctgggaaggttttacgaaaggtgactggcagaatgaagtcaacgtccgtgacttcattcagaaaaactataccccgtatgaaggtgacgaatccttcctggctggtgcgactgacgcaaccaccaagctgtgggacagcgtaatggaaggcgttaaactggaaaaccgcactcacgcgccagttgattttgacacctccgttgcttctaccatcacttctcacgatgctggctacatcaacaaagcccttgagaaaatcgttggtctgcaaactgaagcaccactgaaacgcgcaatcatcccgttcggtggtatcaaaatggttgaaggttcctgcaaagcgtataaccgcgagctggacccaatgctgaaaaaaatcttcaccgaataccgcaaaacccataaccagggcgtattcgatgtttataccaaagacattctgaactgccgtaaatctggcgttctgaccggtctgccagatgcctatggccgtggccgtatcatcggtgactaccgtcgcgttgcgctgtacggtatcgacttcctgatgaaagacaaatacgcacagttcgtctctctccagtctgacctcgaaaacggcgtaaacctggaagcgactatccgtctgcgtgaagagatcgctgaacagcaccgtgcgctgggtcagatcaaagagatggcggctaaatacggctgcgatatctctggtcctgcaaccaacgctcaggaagctatccagtggacctacttcggctacctggccgctgttaagtctcagaacggtgcagcaatgtccttcggccgcgtatccaccttcctggatgcgtacatcgaacgtgacctgaaagcaggcaaaatcaccgaacaagacgctcaggaaatgattgaccacctggtcatgaaactgcgtatggttcgcttcctgcgtaccccagaatatgatgagctgttctctggtgacccaatctgggcaaccgaatctatcggcggtatgggcgtagacggccgtactctggtaaccaaaaacagcttccgcttcctgaacaccctgtacaccatgggtccttctccggagccgaacatcaccgttctgtggtctgaaaaactgcctctgaacttcaagaaattcgccgctaaagtgtccatcgacacctcttctctgcaatacgagaacgatgacctgatgcgtcctgacttcaacaacgatgactacgctatcgcttgctgcgtaagtccaatggttgttggtaagcaaatgcagttcttcggtgcgcgtgcaaacctggcgaaaaccatgctgtacgcaatcaacggcggcgttgatgaaaaactgaaaatgcaggttggtcctaagtctgaaccgatcaaaggcgacgtgctgaactatgacgaagtcatggagcgcatggaccacttcatggactggctggctaaacagtacgtgaccgcgctgaacgttatccactacatgcacgacaagtacagctacgaagcctctctgatggcgctgcacgaccgtgacgtcgttcgcaccatggcgtgtggtatcgcaggtctgtccgttgcggctgactccctgtctgcaatcaaatatgcgaaagttaaaccaattcgtgacgaagatggtctggctatcgacttcgaaatcgaaggcgaatatccgcagtttggtaacaacgacgctcgcgttgatgacatggcggttgacctggtagaacgtttcatgaagaaaattcagaaactcactacctatcgtaacgctatcccgactcagtctgttctgaccatcacctctaacgttgtgtatggtaagaaaaccggtaacaccccagacggtcgtcgtgctggcgcgccattcggcccaggtgctaacccaatgcacggtcgtgaccagaaaggtgcggttgcctctctgacctccgttgctaaactgccgtttgcttacgcgaaagatggtatctcttacaccttctctatcgtgccaaacgcgctgggtaaagacgacgaagtgcgtaaaactaacctcgcgggtctgatggatggttacttccaccacgaagcgtccatcgaaggtggtcagcacctgaacgtgaacgtgatgaaccgtgaaatgctgctcgacgcgatggaacaccctgagaaatatcctcagctgaccatccgcgtatctggttacgcagtacgttttaactccctgacgaaagaacagcagcaggacgttattactcgtactttcacgcagtccatgtaagtggaattgactgaaatcacgcgttaaaaagcgtacaataaaggctccacgcaagtggggcctttttaacaccctcgcttcatcagtctcttttgtccgctatctatactttaatggataacagccaaaacagactcgacatagcctttgagctgtgcatctacataggcccccggatgggccaaattcggagatatcaccgcaatgtcaattattggtcgtattcactcctttgaatcctgtggcaccgtcgatggcccggggatccgctttatcactttcttccagggctgcctgatgcgctgcctgtactgccataaccgtgacacctgggacacccatggcggtaaagaagtcaccgttgaggatctgatgaaagaggtggtgacctatcgccacttcatgaacgcgtccggcggtggcgtgacggcatccggcggtgaagccattcttcaggctgaatttgtgcgcgactggttccgcgcctgccacaaagaaggcattcatacctgcctcgacaccaacggctttgtgcgccgttacgatccggttattgatgaactgcttgaagtgaccgatctggtgatgctcgatctcaagcagatgaacgatgagatccaccagaatctggttggcgtttcaaaccaccgtacgttggaatttgccaaatacattgccaataaaggcgtcaagacctggatccgctacgtggtggtgccgggctggtcagatgatgatgactctgcacatcgtctgggtgaatttacccgggatatgggtaacgtggagaaaattgaactcctgccctatcacgagctgggtaaacataaatgggtggcgatgggtgaagagtacaaactcgatggcgtgaagccgccgaaaaaagagacgatggagcgcgtcaaaggtattcttgagcagtatggccacaaggtcatgtattaacgaaaaggcccggtgaaaaccgggcctttttatattctatttaaagacgccgttaataacggaagtcacaatcgccgtacttagcgcaattaagaccaggtcgtcacctaccacgcgccattcatagcccggataggaaggaagctgacccagcatatcggctggcacggttttcttcgcaatgcccggaggcagtggcttaccgcgcgccaggtttttcgcaattcccggaggcagagagtcgtagcctgttaagccgtaattcagtgccagatggcgggcatgatcgaagctcacgcgagcatccacatcattaccgacatctttgctgtttttaaagctcttatccgatttcccagggttatcctgaccgttattgtgtttattaccatggttaccagcgttcccgttaccatgattgccgctattaccttgtccgccaccgtttccgtgaccaccaccattcccgtttccaggattagccatggccggagccgttgcaaacgttaaagccaacactacggcaagtgcggtagtggaaaaacgacgagtagacatgattgctgccttttagtggtaaactcatttgaattatcgccaggcagtaaaaactcacaataagtaaaagtcttatatgtgacagggacaaaaaagcctgtcatcgacaggcttttaataagtcatgcatgggccactggcgttggatgttcgcccactttgcgcagcagcattaacagataaataaacgacacgctggcgatcataataaacagcagattgtcagaataattttgcatgagcatagcggtaaaagtcggccccagtaaactgccgatggtgtaactcagcaacaaagcctggttcattgcaaccaactggtgatgctcaactttctcacaggcccaggccatcgcgaccggatagagcgtaaagcccgcagctcccagaatgaacagcgcaggcgccattgcggcgttgctgagcatggcgagacagcccatgatgaccacgaaaacctggacgcgcagcaccagcagacgaccaaagcggtccgccaggcggccaatcggccactggccgacaatccccgcgctgaccatcaccgccatccagaaaccgatcccggaatcactgacgccctgatggttaagatagagcggcatcaggccatagagcgagcccagcacaatcccggaaataatgcagccgttaacccccagacgcgcctggcgcagtctcagcatcggccagacgtgggtagcttcctgatgctcgctgttttgattcacaatgcgggtaaagagcagcggcaggatcgccgccagaaccatgcccgtcacccacggcagcacgctcatcaggtcggttggcagtttgctgaccatcagctgtcccagaacggtaccgacgtagtaaaccatcatataggccgccagcagacgcccgcgattacgggacgttccgctgcacattagcgcactttcaaccaccacccagatcatggcgcagccgacgcccgcaataaagcgccagaccatccagctccagaagccgaccatgaggcctaaaccggcgcagccgacggcaaagatcagcgacgccagataataactgcggttaaaaccaaagcgcttaataaggctgcccgttaataaggtgcccagcagattgcccgtaaaaaaggacgagctaaccatacccacctgccaggtcggtaagttttcatgggcgagccatagcgggacgagtgtgtttaacaccgcgatcgccagggtcagcaaaagcaggccacagagcaacaaaagcaccgggcgggtataggtggtcatggattaaaaaccgtgaggaagttcagatttcgtgcgcatcatgccactggcaaaaacaaagtcaatccaccgattcaggcgtcacgcacgttatgcgccttgtcgatttaaaaaactcatcctgctaatgcaaagcctgctactgatattaattatctatttgtttttatttatttccgggaatttttacaacgaaacatcagtcgaaaaatttcatgaatgaaaaaagaaaagccgggcgctatgtcccggctttttataacaaaatctaaaattagctggcgatagccataccgaccgtcatatgcagaccgtaaaatacgccgcgaccaattaactcccctgccagcaccagcacaaaggccagggacagtaacggcagcgcaggcgagtaacctttaagctgaggggcaatccagcacaccagcgccgccgtcagcagcaccacacgccaggccatcagcgaaccgtaatccggcaccagcgccgaagcctgctggatagagctgtgaatagtcgccagctccgctccctgcatgagcgcgacaacggtactgattaccagcgccagcagcgagaccgcgggcagcaggcgcatcgcccaaccattaatgccagccacacgcagcagcagataacccagcagcggcccgccaataaacatggtcaggaagaagctcatcggcgtccagacgctgtaccaggtcgggacggtatcgatggtgttgtacacccggaccatcatccagacgaagacaacgcccagtaccatggtgacgatgagccacaacgcgcgtaaccctgacggcagctttttcaccgctgccagtaaccaccccagcccgccaacggcaaagaagattgccccgctggcaatctcgttactcagcgaagaggcacctacgcggttcagggagttgaacgcgcgcatcggtgagcccaggtgcagcgtagaggcgataaacccaatgcccatcaacacccacaggccaaacatgcttaacaccaaacgctgctgctgttcagcattgaggttcccttttaacagcgccagcgcaaggacgataaacccgcccgccacgcactgcccaaagaccgtgaagatcatcnnnnnnnnnnnnnnnnnnnnnnnnnnnnnnnnnnnnnnnnnnnnnnnnnnnnnnnnnnnnnnnnnnnnnnnnnnnnnnnnnnnnnnnnnnnnnnnnnnnnnnnnnnnnnnnnnnnnnnnnnnnnnnnnnnnnnnnnnnnnnnnnnnnnnnnnnnnnnnnnnnnnnnnnnnnnnnnnnnnnnnnnnnnnnnnnnnnnnnnnnnnnnnnnnnnnnnnnnnnnnnnnnnnnnnnnnnnnnnnnnnnnnnnnnnnnnnnnnnnnnnnnnnnnnnnnnnnnnnnnnnnnnnnnnnnnnnnnnnnnnnnnnnnnnnnnnnnnnnnnnnnnnnnnnnnnnnnnnnnnnnnnnnnnnnnnnnnnnnnnnnnnnnnnnnnnnnnnnnnnnnnnnnnnnnnnnnnnnnnnnnnnnnnnnnnnnnnnnnnnnnnnnnnnnnnnnnnnnnnnnnnnnnnnnnnnnnnnnnnnnnnnnnnnnnnnnnnnnnnnnnnnnnnnnnnnnnnnnnnnnnnnnnnnnnnnnnnnnnnnnnnnnnnnnnnnnnnnnnnnnnnnnnnnnnnnnnnnnnnnnnnnnnnnnnnnnnnnnnnnnnnnnnnnnnnnnnnnnnnnnnnnnnnnnnnnnnnnnnnnnnnnnnnnnnnnnnnnnnnnnnnnnnnnnnnnnnnnnnnnnnnnnnnnnnnnnnnnnnnnnnnnnnnnnnnnnnnntcctgatgccagacgccgttgtcctcctgccagtcgccgcccgcgtattcataaatacgacggaagctaacgtccggggtcagatctttgtaatccttgcaggccagctcgcaggttttgcacccggtgcagcggctggaatcaataaaaaatccatactgggttgtcatcggttactccttacgccttttcaacctgaacgaggtttgtgtgggatgggttgcccttcgccagcggcgacggacgctgcgtagtgagaacgttgatgcagcccgcctgatcgatacggttcgcatccgggttataccaggccccttcccccagcgcgacaacgccaggcatcatacgcggagtcactttagcttcgatatgcacttcgccacgtccgttgaagatacgtacgcgatcgccattactgatgccgcgcgctttcgcatccatcgggttgatccacatctcctgtcggcaggccgctttcagtacgtcaacgttgccgtaggtggagtgaacacgcgctttgtagtggaaaccggtcaactgaagcgggaatttcgccgtcagcggatcgttgtagttttcgaagcctggcgtataaatcggcagcggatcgataacgtccccttccggcaattcccaggttgcggcaatttttgccagctcttcggagtagatctcgattttgcccgacggcgtggtcagcggattggcctgcggatcgtcgcggaaggctttatacgccacgtgatgcccttcgggatcgcgctgcttgtacatgccctgcttgcggaaggtatcgaagtccggcaggtcaggaatggctttgcgtgagagctcgtgcagatggcgcatccacccttcctgagtacgtccttcagtgaactgctgctcaacgccaagacgtttcgccagctcggaagtcatctcatagatggttttgcactcgaagcgcggtttgatggcctggtcagtgaagatcacataggacatgttgccgcaggaggcgtccagcgcgaaatccatctgctcagacgcagtgcagtctgggagcagaatatcggcatacttcgccgatgaggtcatgtggcagtcgatcaccacaatcatttcgcacttcttgtcgtcctgcaaaatttcatgggtgcggttgatttcagagtgctggttgatcaggcagttaccggcgtagttccagatcattttgatcggcacgtccagcttatctttgcctcgaacaccgtcacgcagcgcggtcatttccgggccgcgctcgatcgcgtccgtccacataaacatggagatgctggtctgaaccgggttatccagcgttggcatacgttcaaacgggacttcatacgagccttcacgcgccccgctattaccgccgtgaataccaacgttgccagtcagaatcgagagcatagaaatagcgcgggtggcaatttcgccgttcgcgtgacgctgtggtccccatccctggctgatataagccggttttgctgaaccaatttcacgggccagctgaacaatacgctcgactggaatgccggtaatggtggatgcccactcaggggttttcgctaccccgtcgctgccctgaccaagaatgtacgctttgtaatgcccgttagccggtgcgctggctggcagggtcttctcgtcataacccacgcagtatttatcaaggaacggctgatcgacgaggttttcagtgatcatcacatacgccagcgcattgaccagcgccgcatcggtaccagggcgaatagggatccactcgtcttcacgtcccgcgccggtatcggtatagcgcggatcgacgatgatcatacgtgcgttggatttggcgcgcgcctgctcaagataataggttaccccaccgccgctcatccgggtttcgcctgggttgttaccgaacaacaccaccagtttactgttttcgatatccgacgggctgttaccgtctgcccagccgccgtaggtgtagttcagacccgcagcaatctgtgcggaagagtagtcgccgtaatgattgagatagccgccgcagcagttcatcaggcgcgccaccaacgttttacccggcggccaggagcgggtcatggtaccgcccagcgtcccggtgccgtagttgaggtagatggattcgttgccatactctttgatcaggcgctgcatgttagtcgcgataatatcgtaggcttcgtcccagctaatacgctcgaacttcccttccccacgcttaccgacgcgcttcattgggtatttcagacgatccgggttataaacgcgacggcgcattgaacggccacgcagacaggcacgaacctgatgtaacccttcgtagttatcatctccggtattgtctgtttcgacatatttgatttcaccgtccacaacatgcatacgcagaggacaacggctaccacagttaacggtacaggcactccacaccactttttccggggctgaagcgggagacagagcctccgccgccgacgccagacgggtaaaagggagcgtaaaggcgctgctggcaaccgccagaccgcctattgccgtggttttcatcaacccacggcgagtgacctcggcagccattaacgcttcaggcgctttgattttcataaagactcactttggttgctcacaaagaaataaagggcggcatacaccgctatatagttttatgtataacgatatttttggttatcagtgttttatgctgactttcgnnnnnnnnnnnnnnnnnnnnnnnnnnnnnnnnnnnnnnnnnnnnnnnnnnnnnnnnnnnnnnnnnnnnnnnnnnnnnnnnnnnnnnnnnnnnnnnnnnnnnnnnnnnnnnnnnnnnnnnnnnnnnnnnnnnnnnnnnnnnnnnnnnnnnnnnnnnnnnnnnnnnnnnnnnnnnnnnnnnnnnnnnnnnnnnnnnnnnnnnnnnnnnnnnnnnnnnnnnnnnnnnnnnnnnnnnnnnnnnnnnnnnnnnnnnnnnnnnnnnnnnnnnnnnnnnnnnnnnnnnnnnnnnnnnnnnnnnnnnnnnnnnnnnnnnnnnnnnatcaaatcagaggcataaaaaaagacgccctgaggcgcttttttgtcttagagcaaataattagccgatgaactgctggcctttcatgtaagggcgcagcacttcagggatctcaatgcgtccgtcagcctgctggtagttttccagcacagcaaccagcgtacggcctactgccagaccagaaccgttcagggtatgaaccagacgggttttcttgtcagatttgctgcggcaacgcgcctgcatacggcgtgcctggaagtcccagacgttagagcaggaggagatttcacggtaggtgttttgcgcaggcacccagacttcgaggtcgaaggttttgcaggcgccgaagcccatgtcaccggtgcacagcgccatacggcgatatggcagccccagcagctccagcactttctcagcatgacccgtcatttcttccagcgcgtccatagactcttccggacgaacgatctgcaccatctcaactttatcgaactggtgcatacggatcagaccgcgcgtatcgcgaccgtaagaaccggcttcagaacggaaacatggagagtgtgcggtcagtttgattggcagatcgtcttcgtcgatgatctcatcacgcacgaggttggtcagcggtacttccgcggttgggatcagcgcgtagttgctgctgtctgcttcctcgtccagcggacgggtgtggaacagatcgccggcaaatttcggcaactggccggtaccgtacagcgtatcgtggttaaccagatacggaacgtaggtttcgctgtagccatgctgctcggtgtgcagatccagcatgaactgcgccagagcgcgatgcagatgggcaatttgacctttcatgaccacaaagcgagaacccgtcagcttaaccgcagccgcaaagtccaggcccgcatgcatttcgcccagcgtgacgtgatcgcgcacctcgaagtcaaactcgcgaggcgtgccccagcgtttcacttcaacgttgtcgttttcgtctttgccgacaggcacgctgtcgtcaggaatgttcgggatcgccagagcgatatcacgaatttcagcctgaagaacatccagttcagctttcgcctgatccagctcttcacccagtttgttcacttccaggcgtaatggctcaatatcttccccgcgcgctttcgcctggccaatggatttcgatcgagaattacgctctgcttgcagattttcagtttgtacctgcaaaactttacgacgctcttcaagagcgcgcagcttatctacatccagcttaaagccccggcgtgccagtttttcagcgactgcgtctggctcattacgcagcagattgggatcgagcatgcttatcctgtgcttatcgaattaaaaaaggaaaaagtgaccacagcctgcggccacagagatatattgccaacattaccgcaacgattgaactaacggtagcgttttatagggctattttgatcctgtccggcaagccaggcgagcttttcgccaatcttaccctcaagacctctgtttgtgggatgataatagcgggtttgtgccatctcctgcgggaaatactcttccccggcggcgtaggcgttgggttcatcatgggcgtagcgatactcctgcccataccccatctctttcatcaatttagttggcgcattgcgcagatgaaccggcacatcgtagtccggacgttcacgcgcatccgacatcgccgctttgaaggcggtatacaccgcgttacttttcggcgcgcaggccagatagacaattgcctgcgcaatggcacgctcaccttccgcgggcccgacgcgggtaaagcagtcccaggcggaaatagcgacctgcatggcgcgtggatcggcattaccgacatcttctgacgcgatggccaggcagcgacgcgcgacatataacggatcgccaccggcggtaatgatacgcgcgtaccagtagagcgccgcatccggggcgctgccgcgcacggacttatgtaatgcagagatcaggtcgtaaaaacgatcgcctttattatcgaagcgtgcgctgcgctcaccggctatttcggtcagcagctcctgctttagcacccgctttccggcatcatccacttcggccatatcggccatcatttccaacgtattcagcgcccgacgcgcatcgccgttgaccagttcagcgatcgcacgacgcgtgtcgtccggcagaacgatatcctgtccgccgtaaccccgcgctttgtcctccatcgcctgggtcagaaccttttcgatatcctctgtggtcagggatttaagcaggtaaacgcgggcgcgggaaagcagcgcggagttgagttcaaacgacgggttttccgtggttgcgccgatgaagaaaatcgtgccgtcttcaatgtgcggcagaaacgcatcctgttggctcttgttgaagcggtggacttcatcaacaaaaagaatggtgcggcgcccggcattacggttttgccgcgcgcgctcgatcgcctcacggatctccttcacgccggaggtaaccgccgagatacgctcaacgtccgcgttagcatagcgggcgatcacttcagcgagggttgttttgccggtgccgggtggcccccagaggatcatggagtgcagatgcccggcctctatggcgcgcggcaagggtttccccgcagccagcaggtgttgctggccgatgtactgcgctaaattttctggccgcatacgggcggccagaggttgaaacgcattatctgaaaaatcgagcgacaggttgctcactcatgcctcttacttattacgttggtcgtccaccgttacgccctgcggcggggtaaaggtgaatttcgaagcatctacagcgccgttttgctgagacttaagctgatagctactgcgctgatcgtcctgctcaaccgcaccgaactgattaatggtaccgttgctgctcacgttaatggtgaactgcttcaggttaccgttgctgccttttggcgtcaggacgaactcatcaccgttttgtttaatgttgtactgctgccagtcgctggactggttacgggcaatgagcataaacggcgtattgctggtcgcgtctttcagccaggtggcggtcgcctgctcaacaaacggattgtagaaccataaggttttcccgtcggacaccagcacgctttcatccggctgggtcatgtgccagttgaagagattcgggcgtttcacccacaaactccccctgaccttcctgcaccgcgttgccactgccgtcagtcactttttgcgtgaagctggcgtggaagctgctcactttatccagtcggcttttaaggtcgctggctgcatcagcccagacgctgctggcaacaaaactggagagtaatgcacaggcgatggcgatttttttcattgttattccttaaaataacgtcttcccgatatnnnnnnnnnnnnnnnnnnnnnnnnnnnnnnnnnnnnnnnnnnnnnnnnnnnnnnnnnnnnnnnnnnnnnnnnnnnnnnnnnnnnnnnnnnnnnnnnnnnnnnnnnnnnnnnnnnnnnnnnnnnnnnnnnnnnnnnnnnnnnnnnnnnnnnnnnnnnnnnnnnnnnnnnnnnnnnnnnnnnnnnnnnnnnnnnnnnnnnnnnnnnnnnnnnnnnnnnnnnnnnnnnnnnnnnnnnnnnnnnnnnnnnnnnnnnnnnnnnnnnnnnnnnnnnnnnnnnnnnnnnnnnnnnnnnnnnnnnnnnnnnattctggacctgcccgaaggcaggcgacagaagaatatgcttaatttttgctgatttacccttctttgcaatcgctgaaggttaatcaaacggcggtggcgccagcacctcacggttaccgttatgcccctgttcgctcacgatgccctgggcttccatctgctcgatgatacgtgccgcgcggttgtagccaatacggaactggcgctggacgccggagatagacgccttacgtttttcggtaacgaaattaaccgcctggtcaaataacggatccagctcttcgccgccgtcaaaaccaccgccgccaccttcgctttcactgtcggaggtgatgccgtcaacgtattgcggccgaccgcgcgctttccagtcctgcaccaccgcatgcacttcctggtcgcgaacaaacgcaccgtgtacgcgcaccggcgaggtggagttcgggccggaatagagcatatcacccatacccagcagcgactctgcaccgccctggtcaaggatagtacgcgagtcaattttactcgacacggtaaacgcgatacgggtcgggatgtttgccttaataagaccggtgataacgtctacggacggacgctgcgttgccagcaccaggtggatgcccgccgcacgcgctttctgtgccagacgcgcaatcagctcttccactttcttgccaacggtcatcatcaggtcggcgaactcatccaccagcaccacgatgtaaggcagtttttccagcaccggatgctgggtatccatgctgtcccccggcttccagtatgggtccggaatcggacggcccatacgtgccgcctcagcgattttctcgttataaccggccaggttacgcacgcccagcgcagacatcagcttgtagcgacgctccatttcattgacgctccagcgcaatgcgttggcggcgtccttcatgtcggtcactacttccgttaacaggtgcggaatgccttcgtagacggacagttcaagcattttcgggtcgatcatgatgaaacgcacatcttcaggctgcgctttgtagagcatactgaggatcatggcgttcaccccgaccgatttaccggagccggtggtacccgcaaccagcaggtgcggcatcttcgcgagatcggcaaccaccggatcgccagcgatatctttacccaacaccacggtcagaggggacgggttgtcgcggaatttggtgttatccagaacttcacgcagataaacggtctggcgtttcttgtttggcagctcaaggccaacgtaaggcttacctgggatcacttccaccacgcgtaccgccacggtcgacagagaacgcgccaggtcacgggagaggttagaaatacgcgccgcttttacgcctggcgccagattcagttcgaaacgggtgatcaccgggccaggtgagtagttcaccacgtccgctttaatacggaagtcagccagacgcgcttccaccagacgggccatctgctcaagagcaaaagtatccaccggttcgacttccgctggcggcggcgttaacagatccagcgacggcaacggcgtacttggtcgttgcagcggacggctgtctccgttacgcatcagcagcgggtgaatcaggctttcctgcggctgtggtgctggctgctggaactgcggctgcggcggttgggccggcggtgtatgcggctgcgcataagcctgcggcgctggctgttgtggctgcgcattaacctgcggtgctggcgcctgacgcaccggttccgcttctggcatcacgctcggcgtgaacagcggttcgctcggaccgtcatccaccagatctttcatcggtgaaaattcaaaatccgagagcgagaacgggtttgcccccgaaggctgctcaccggaataacgttgctgctgcgtggccgcaaactgacgcgctaattccgcttcggcagcatcatcttcatcctgctgagaatgaacatcgtgttggtactcattcccgtagcgttgagtctgctgggcggcaaactgacgcgccagctcatcctgatgcagttcgtcggcatcatcttcgtagtcggactcacgggctttttcttccgccatacgctgggaaggcagtttaatgccataagaggccagctcccggcgcgttggtacgcgcacgcgattagggcgcggcaattgtggaccaatgccctcttttacctgaggacgcggcgcaccgtcggttgccgggctgaatagcggagcggacgcggcagcggctgccgttgcctgcttcacggtttccgctcctgacgcaacggctggcgctggatctacaggtgcaacgcttgcagaaggcgcttttacaacaggctcctgcaccggctcaggcacgggctgataccaggcggcaagctgctcgcgctctcgggcacggcgctcttccacctcttcaaaatagtacaatggcggacgggatggcttcgcttcctccaccacttcgggttcagacaccggcgcaacgtatggctgttcaggttcagcaggttcgggcgtataagcctgatacggctgttgcggctcgctggcaggctcaggcggctgatacggttgctgccactgttcctgctgcacaggaatatagctttcaggctccggcgcaatggtcggttcaggcgtatggacacctggcgcagtctgccagtccacctgcggttgctggatcgcggactccggtgccggaacaggcgaggacggcatcacggcttcaacaggcgcaacatgggcctgcgcagccgtcgttgcggcagcagcagcggctaccggttcagttacggaatgaccatgcaacagcggatcgtattcatcatactcacccggcgtagctcgatgaccagagaacaacacatcatcaggatcgacggccgcgccgcgatactcaatctgctcctcttcatccatacgtttgccggagaaaagcgcggcatccgttttacggcctaacgggttagcaaatttttcagcaacgcgctggcggcgcgccagagcaccgcgcagaatacgggcacggcgggattcacgacgctgcacgggtgcctcgtcttcctcttcgtactcatcttcatattcatcttcatcgacccacgtatcatcacgacgggtgcgattgctggcaaacgtcagcagagtcagaataaagctgccgattttttcggcaatgctcacccaggaccagccggtaaacagcgtcaggcccgctgcccagatacaaagcagcgccagcgtgccgccgctgctgtgaagcatcggttgtagcgcggagctcaacaggctgccaatcaccccgcctgaggcgaagtaccagatgtcatcggcgttgatcgccgccagtccgcaggaggtgaggatcagcgccagggcgccaatcaggcgcagcgaaacggcaaaataatcgatgtagtcgtcgttctgtcgatgacgccaggcaaaccagcatccgccaataatgatgacgggaagggtataggccatcacaccgaaaatgaagaagagcgtgtccgcaagccaggcgccgggaacgccacctaaattatggataggctcatgccatgcggtttgcgaccagctggggtctgaggggttgaaactgagtaaggcagccatcagccagacggcaaaaagggcaataacaatcagtaacgcctcaaggagacgacgtccgctgcttagcttagataatgtgacttctttgtcttcagtgtattcctggctcaagaaaggctctccaggtatcaggcatgtcctgcctgtgtgctaaaacggacaacagcgccgggacttcccggcactgttgctgtatggattaacaggagtgtaatcaaactacactgattttgcacctgttccgtgttagcgcgtcttaataaccagacgattgctctgtttgacctcttccatcaccacataagtacgggtgtcgttcacgcctggcagacgcagcagggtttcacccagcagcttacggtaggcggacatatcaggcacacgggttttcaacaggtagtcaaaatcaccggaaaccagatgacactcttgaatttcttcaagtttttgtacagcggcgttaaattgctcaaacacatctggtgcaccacgattcagagtaatctcaacaaataccagaagtgaggcatccagataatgcgggttcagcagagccgtatagccctgaataaaaccctgtctttccagtcgacgcacacgctcaaggcacggcgtcggggaaagtcccacacgttttgaaagctcgacgttggaaatacgcccatccttttgcaattcattaagaatgttacgatcgatacggtcgagatctttgccagggcgcttcttgctatctaccattattattgtctctctgtattccttccctactcctgcctggaccctgtgcacatcactgttcagagcctggacccgttattcatcacatcgcctggttatgtattagacgcgatgtagattcgggttctgcggtaagaagaccgttgcccgaaagcagtcacagacatcacgtatggcgtctgtccacaccatgcgtagatttcactgacccggtaaaaatggcatttccgtgcatgtctatgcggcatgcagttcgtgcgtctttttttcttccttgaatgttttcgcaaaagcgcaggggattgtcaaagcaaaacatcgatttttagtacaacatgccggatattcattacggaggggtattaatcctcattttattgccttataaacgcgcggttttcagtagcagaagtgatgtgaccgcctctgacccatagggcgcgtctattgcatatatcggaagcaaaactctcctgctctttttttacggcaacaaattccctacaatccagcccattgcctgccaacaacaatggggatctcatgggcacgaccaaacacagtaagctgctaatccttggttctggacctgcgggatataccgcagcggtctatgctgcacgcgctaacctgcaaccggtactgatcaccgggatggaaaaaggcggtcagctgaccaccaccacggaagtggaaaactggcctggcgacccgaacgacctgaccgggccgctgctgatggagcgcatgcacgagcatgccgccaaattcgaaaccgaaatcctgttcgaccacatcaataaagtggatttgcagaaccgtccgttccgcctgacgggtgacagcggcgaatacacctgcgatgcgctgatcatcgccaccggcgcctctgcccgctatctcggcctgccgtctgaagaagcgttcaaaggccgcggcgtgtcagcctgcgcgacctgcgacggtttcttctatcgcaaccagaaagttgcggttatcggcggcggcaacaccgctgtggaagaagcgctgtatctggcaaatattgcctcagaagtacacctgattcaccgtcgcgacaccttccgcgcggagaagatcctgattaaacgcctgatggacaaagtggcgagcggcaacattgtgctgcataccaaccgtacgctggaagaagtgactggcgatcagatgggcgtggcgggactgcgtatccgtgatacccagaacaccgataacgtcgaaacgctggaagtggcaggcctgtttgtggcaatcggtcacagcccgaacacggctatctttgaaggccagctggagctggagaacggctacatcaaagtgcagtctggcattcacggcaacgccacccagaccagcgttccgggtgtcttcgcagctggcgacgtgatggaccatatttatcgtcaggcgatcacctctgcgggcaccggttgtatggccgcgctggacgcagaacgctacctggacgggctggctgaacaaggcaaataatctttacaagtcagtaacaaacgtaaataaaggcggccactggtcgcctttatttttgctcgcgtgtaacatgcagaggtctaatttcttataacgtcacctgcaaagtacgcaatggaaaaaacccgtcaacaagagttaacccgctggctgaaacagcaaagcgttctgtcccgccgctggcttatgatttcccgcgttttgggattcatcagcggtctgttgattgttgcccaggcatggctgctggcccgcattctcaaccatatgatcatggagaacatcccgcgcgaagcgctgctgttgccgtttatcgttctggtgctggttttcgttctgcgtgcgtgggtggtctggctgcgcgagcgggttgggttccacgccgggcagcacatccgctatgagattcgccgcaaggtactcgatcggctttcggaagccggacctgcgtggatccagggtaagccagccggcagctgggcgacgctgatccttgagcaaatcgacgatatgcacgattactacgcgcgttatcttccccagatggcgctggcggtgtttgtgcccctgatgattgttatcgccatcttccctgttaactgggtggcggcgttgatcctgctaggcaccgccccgctcatcccgctgtttatggcgatggtcggcatgggtgcggcagatgctaaccgtcgtaacttcctggcgttgggtcggttgagcggtcatttcctggaccgtctgcgcggaatggaaaccctgcggatcttcggtcgtggtgaagcggaaaccgaaaacattcgcctggcgtcgcaggattttcgtcagcgcaccatggaagtgttgcgcatggcctttctctcatctggcgtgctcgaatttttcacctccctgtcgattgcgctggtggcggtttactttggcttctcctacctcggcgcgctggactttggccactacggtacggcggtcacgctttccgccgggttcctggcgctgatcctggccccggaatttttccagccgcttcgcgatctcggcaccttttaccatgccaaagcgcaggcggtgggtgctgccgacagtctgaaaaccttcatggaaacgccgctggcgaatccggagcgtggtgaggtaacgctgaatacgaacgatccggtgaccattgaagcacaggatttttctgttctgtcgcctgaaggcaaagtgctggccggtccgctgaactttaccctgcctgccgggcaacgtgtggtgctggtgggtaccagcggctcaggtaaaagctcattgttgaatgcgctgtcaggttttatggcgtacaccggatcgctgcgtatcaacaaaacggagctgcgcgagctcgatccggatgcctggcgtaaacagctgagctgggtggggcaaaaccctcagctgccagctccgacgctgcgcgagaatgtgctgctggcacgcccggatgcgcgtgaagatgagctgcaatcggtcctcgaccgcgcctgggtcagcgagtttctgccgctgcttgcgcagggtgtcgataccgtcattggcgatcagtctgccgggctgtcagtaggccaggcacagcgcgtcgcggttgcccgtgcgctgctgaatccctcttcgctaatgctgctggacgaacccgccgccagcctggacgctcacagcgagcagcgcgtgatggatgcgcttaacgcagcctcacgccagcaaaccaccctgatggtgacccaccagctggaaggtattgccgactgggatcagatttgggtgatggaaaacggacacattgttgagcaaggcgattacgccgcgcttgttgccgcgcaggggccgtttgcgaccctgctggcgaaccgtcaggaggatatctgatgcgcgccctgcttccgtatcttgcactgtataaacgccacaaatggatgctgacgctcgggatcgtgctggcgatcgttactctgctggccagcatcggtctgcttacgctttccggcnnnnnnnnnnnnnnnnnnnnnnnnnnnnnnnnnnnnnnnnnnnnnnnnnnnnnnnnnnnnnnnnnnnnnnnnnnnnnnnnnnnnnnnnnnnnnnnnnnnnnnnnnnnnnnnnnnnnnnnnnnnnnnnnnnnnnnnnnnnnnnnnnnnnnnnnnnnnnnnnnnnnnnnnnnnnnnnnnnnnnnnnnnnnnnnnnnnnnnnnnnnnnnnnnnnnnnnnnnnnnnnnnnnnnnnnnnnnnnnnnnnnnnnnnnnnnnnnnnnnnnnnnnnnnnnnnnnnnnnnnnnnnnnnnnnnnnnnnnnnnnnnnnnnnnnnnnnnnnnnnnnnnnnnnnnnnnnnnnnnctccgcgtctgcggccgcaggctttgccggactgtacagctttaactacatgctgcctgccgccggggtgcgcggcacggcgattacgcgaactgccgggcgctactttgaacgtctggtcagccacgacgcgaccttccgcgtgctgcaacacctgcgtatttacaccttcagcaaactgctgcccctctccccctgccgggctggcacgttttcgacagggcgaattactcaaccgcgtggtcgcagatgtggatacgctggatcacctctatctgcgcgtcatttcacctatggtgggcgcgtttgtagtgattgtcgtggtcacgctggggttgagtttcctggatgttcccatcgcactgacgctcggcggcatcatgctgatgacgctgattattctgccgcccctgttttatcgtgcaggtaaaaccaccggggaaaacctgacgcgcctgcgtggagaatatcgccagcagctcaccgcctggttgcagggacaggccgagctcaccctttttggtgccagcaagcgctaccgcgcccgcatggaaaatacggagctgaactggcatgaagcccagcgtcgccagtctgaactgaccgcgttctcccaggcgctgatgatgttaattggtgggattgccgttatcgccatgctctggatggcctccggtggcgtgggcggtaacgcgcagcctggcccgctgattgcgctgtttgttttctgtgccctggcagcctttgaagccttagccccggtcacgggcgcctttcagcatctcggccaggtgattgcctctgcgctgcgcattacggatattgccgagcaggagccggaagtgaagttcagcgcgggtcaaaccgttgtgccagagcaggtcgcgctgacgctcagcaatgtcactttcgcctacgacaagcaggcgcaaaacgcgctggaagacatcaccctttctgttgatgccgggcagcgcattgcgatccttggccgtacgggatgtgggaaatcgacacttctgcaacttctcacgcgcgcgtgggacccacagcagggcgagattcggtttaacgacgttccgctgtctggttttagcgaagcggccttgcgtaaaacggtcagcgtcgtgccccagcgggtgcatctgttcagcgctacgctgcgcgataatcttcttctggcggcaccagacgcctccgacgatacgctgcgggcaatgctggagcaggttgggctgcacaagctgcttgaagacgacgggttgaacagctggctgggtgaagggggtcgacagctttccggcggcgaactgcgtcgtctggccattgcgcgtgcgctgctgcacgatgcgccgctgatgctgctggatgaaccgacagaaggactggatgccacgacagagagccaaatccttgatttactggcgaatgtgatgaaaggtaaaaccgtgctgatggtcacgcaccgtctgcgcgggctggtgaatttcgatcagataattgtgatggacaacggacacataattgagcaaggtagtcacgcagagctgctggcaaaacaaggtcgctactaccagtttaaacagcgcctgtagactatatttgtagcgtcctctctcgcgtactggagttctgttgtcatgcgcctggtgcagctttctcgccataatattgcgttcccttctccggagggggcgctgcgtgaacctaacggcttgctggctctgggcggcgatctcagcccggcacggctcttaatggcttaccagcgcggcatctttccgtggttttctcctggcgacccgatcttatggtggtctcctgacccgcgagccgtactgtggcctgggcagtttcacctgagccgcagcatgaagcgttttcatgcaaaatcaccctttcgcgtcacgcttaatcacgccttcggccaggttatcgaaggctgcgctgaagatcgtcacgaaggcacctggataacccgcgatatcattatcgcctatcaccagcttcatgagctgggttacgcgcattcgatcgaagtgtggagcggcgacgacctcgtcgggggcatgtacggcgtggcgcagggtacgctgttctgcggcgagtcgatgttctcccgcgccacgaatgcgtcgaaaaccgcgctgctggtttttagcctggaatttgcccgacgtggaggacagttaatggattgtcaggtgctgaatgagcacaccgcctcgctcggcgccgttgaaatctcccgccgacactatatcgaacacctggaacagtgccgaaaggagaccctaccacgcgatttttgggttcccagaacgctctttatacccaatgcctaaatgttttccgcatattttttatgagggtgttataattacgccgcagagtagcttctgcctgttgccccgccgccgtttgggaccctcgcttcagataacgtccttacgtttatcctgtcgtctcccctttacgaatgcgctttccgttcggttgtaccgtgacgcttgggcaatacgctgagactgttttgctgcgttttaaacgcgcaattctttacttaattgaggaatttcggcattatcttgccggttcaaaacttggtagtgataccccagaggattagatggccaaagaagacaatattgaaatgcagggtaccgtacttgatacgttgcctaataccatgtttcgcgtagaactggaaaacggtcacgtggtaactgcgcacatctccggtaaaatgcgcaaaaactatatccgcattttgacgggcgacaaagtgactgttgaactgaccccgtacgacctgagcaaaggccgcattgtcttccgtagtcgctaattgttttcgcctgtaatggcagatgaatattaaataaggccgggatattcccggccttattttttgttagtacagtcgattatttgaacgattggttgggttttgtttcggctttagtgttggttgtgcggtggtgcacacaataaaatcacacagccttacactcgatgatttctaagctgcctgtacggcagtgcacggatgattcagacgcgcggccgcccggtaacctttctaagctgcctgtacggcagtgcacgcttcatcaacaagcttatgagcaaagccgattttctaagctgcctgtacggcagtgcactttgccctaacggcatagtcgctgtcgctgtttttctaagctgcctgtacggcagtgcacatgaaccagctggagggtccgcaggacattcctttctaagctgcctgtacggcagtgcacacactgggcacagaaagaacaggtatgcgcaatttctaagctgcctgtacggcagtgcaccaagggcatcaagaatctgacctacgcctgactttctaagctgcctgtacggcagtgaacattccatggttactccgtcattcaaagcggattttctaagctgcctgtacggcagtgaacatatcatctgcggttggcttcgcgctggctgatttctaagctgcctgtacggcagtgaacagcgaccaggtgaagcgtaggatgggctacaatttctaagctgcctgtacggcagtgaactggaagaaatcttcgccatcttattgttcgaaaagaaaataatcaacatatctacctcaaacccttttttctgcggcctttattcgcacaataaaaatcaataacttaaagaactactcgaaaaaagggtttcgccataccgcgccggagtcccttccccgacgcacgagactaaacttaattaatgatatgaactacaggctttccacattcaggtgcagccacatctgccgccatcgaatgtgtaatgtcatgcagcaatcctgtcagatggggcagcatctcgcggtcaaaatgcgacaccagcagcacgtggtttaatgcccggcagtaatcgcatttggtttcggtatcctccagaagccactctttttccttcagccgttccgtctcgtcgtcaaattcaaccacccggaaatcactcattgattctgcgagttcggttttgactacgtccagataagcaccgagacaacggcaaacgggctgcgtttgcgggagcgaattacagtccagcaggatttccgtgagcagattacagcgctcgacgagggttgggagatcgggattgagagaaagttcgctatagaactgggagaaattgatttctgtattcattgggtaattccttcacacacatgaatttaccaccgcaggaaacgccagattcgctggcggcggacgaaaaggaattggcgtaccagtgtgtgcacctggcgcttcaaaagaagcttccgattcgcccgccagatgcagaattatacccttttccttagggcgaacgaagcctacagcaatactgctggtcacacactttcaggacgccaatcccgacacctgattttgcaggtgcgccgccattttatgcctgtgaatttatccagcaataagcctcgaaagaaactggaaagcgcctcgcaaaatttcgttgcggtctgatgnnnnnnnnnnnnnnnnnnnnnnnnnnnnnnnnnnnnnnnnnnnnnnnnnnnnnnnnnnnnnnnnnnnnnnnnnnnnnnnnnnnnnnnnnnnnnnnnnnnnnnnnnnnnnnnnnnnnnnnnnnnnnnnnnnnnnnnnnnnnnnnnnnnnnnnnnnnnnnnnnnnnnnnnnnnnnnnnnnnnnnnnnnnnnnnnnnnnnnnnnnnnnnnagaaaagcggacacaaaaagccgggttaaaaacccggcttttacactaaagaaaatcagtgagccgcttccggcttgtgcttcgccgcactctggaaatcgtacgtcagttcgttcttcgcctgatccagccccaccgttacctggccgccgtccaccagcgagccaaacagcagctcgttcgccagcggtttcttcaggttgtcctgaatcacgcgcgccatcggacgggcgcccatcgcacggtcgtagcctttctcagccagccagttgcgggcctcctggctcacttccagcgacacgcctttctgatccagctgaacctgcaactcgacgatgaacttgtccaccacctgatgaatcacctcggtagacagatgatcgaaccagataatgttgtccagacggttacggaactccggcgtgaagatcttcttgatctcttccatcgcatcggtgctgttatcctggtggatcaggccgatggatttacgctcggtttcccgcaccccggcgttggtggtcatcaccagcaccacgttgcggaaatcggccttgcgcccgttgttatcggtcagcgtcccgttgtccatcacctgcaacaggatgttgaacacgtccgggtgcgctttctcgatttcatcgagcagcagtaccgcgtgcgggtgcttgataaccgcgtccgtaagcaggccgccctggtcaaagcccacgtatcccggaggcgcaccaatcaaacggctgacggtatgacgctccatatactcggacatatcaaagcgcagcaactcaatgcccagcgctttggagagctgaaccgtcacctcggttttacccaccccggtcgggccggcgaacaggaaggaaccgacaggcttgtggtcatgccccaggccagcacgggccatcttgatcgcttcggttaaagcctcaatggctttatcctgaccaaagaccagcattttcaggcgattgccgagggtgcgcagcgtatcacggtcgctctgagaaacgctcttctcaggaatacgcgcgatgcgggccaccacggactcgatatccgccacgttcacggttttcttacgcttgctggctggcatcaggcgtgcacgcgcacccgcctcatcaatcacgtcgatcgctttatccggcagatgacgatcgttgatgtatttcaccgccagttccaccgccgcacggaccgctttcgcggtgtaacgcacgtcgtggtgcgcttcgtacttagttttcaggccattgatgatctgcaccgtttcgtcaaccgacggctcggtcacgtcgattttctggaaacgacgcgccagcgcacgatccttctcaaagatgttgctgaactcctggtacgtcgtggagcccatcacgcggatcttgccgctggagagcagcggtttgatcaggttagcggcatccacctggccaccggaggccgcacctgcgccgatgatggtgtggatctcatcgataaacaggatgctgttggtgtcctgctccagctgttttaacagcgctttgaaacgtttttcgaaatcaccgcggtatttggtgcccgccagcagcgagccaatatccagcgagtagatggtgcagtcggcaatcacttccggcacgtcgccctgcacaatgcgccaggccagcccttcggcaatcgcggttttacccacgccagattcccccaccagcagcgggttgttcttacggcggcggcacagcacctggatggcacgctccagctctttgtcgcgaccaatcagcgggtcgataccgccaacgcgagcaagctggttaaggttggtggtgaagttttccatacgatcctccccgcctgcttgctcttcattgctgttgatctgtccgctgggatccgatgcctggttaggctcgtcttttcgcgttccgtgagagatgaagttgaccacgtcgagccggctgacttcgtgtttacgcagcaggtaggccgcctgggactcctgctcgctgaagatggcgaccaggacattggcgccagtcacttcgctacgtccggaagactggacgtggaaaaccgcgcgctgcaacacgcgctggaagctgagcgtcggctgcgtgtcgcgctcttcttcactggctggcagcaccggtgtagtttgttcgatgaaggcttcgagttcctgacgtagcgccaccagatccacggagcaggcttccagcgcttcgcgggcagatgggttgctaagcagtgcgagcagcaggtgctcgacggtcataaactcatgtcggtgctcacgcgctctggcgaaagccatgtttaaactgagttccagttcttgattgagcataggcacctcccccaattttatgccttatcaggccttttccagcgtacacagcaacggatgctcgttctcccttgcatagtcgttcaccatcgctactttggtttccgcaacctcggcagtaaagatgccgcagatcgctttgccacgataatgaacggtaagcatcagttgcgttgcacgttcaacatcataagaaaagaacttttgtagcacgtcaataacaaattccatcggcgtgtaatcatcgttcattaacataactttatacatagatggcggttttagcgcgtcgcgcactttatcttccgccagctggtcaaaatccagccaatcgttggtcttacccattatgcataaccactttgaatctacctcagatgttagataacaatcatctattactgtcatccgcgatgtctgtcacaaactgttgcaatagcgttaactgcctcaaattttggttgattattgtcccaactccagcgccaaacgcttgacggcttcttccgtttctctaaattgtacaagcgtgagttggcgaggttttgaacagcccccactccaccaccggttcattccatcttaatttataagatttacgaaggatgtcgaagcatggaaatgggtactgttaagtggttcaacaacgccaaggggtttggcttcatttgccccgaaggcggcggcgaggatatcttcgctcactattccaccattcagatggatggttacaggacgctcaaagccgggcagtccgtccggttcgatgtacaccaggggccaaaaggcaatcacgccagtcttatcgtgcccgttgaagcagaaacggttgcatagctctctgattcattgtgtacaccccgcaggcaaaatgccagcccgatcggctggcatttttattttcgggttattcccgcgttattcccgcgccagcgcatccaccggatccagccgcgccgcgtttcgtgccggcagccagccaaacaaaatgccggtaaaggtggagcacaaaaacgcggtgaggatcgccatcggtgagaagccaatctcccaccccggtaaaaagagctggagcgcgaaggcgatcatcatcgagagcgcaatccccatcgcgcctcccaccagacacaccagcaccgcttcaatcaaaaattgctggagcacatcgctggctctggccccgaccgccatgcgaatgccgatctcgcgcgtacgttcggtcaccgacaccagcataatgttcatcacccctatcccgccgacgaccagcgaaatcaccgccaccagcgtcaggaacagctgaagagtacgtgtggtcttttcggccgttttcaagaggccgtccatgttccaggtgaagaaatcctttttcccgtggcgcaacgttaacagccgctcgagctgctgttccgccagcgcgctgtcgtagccctctttcactcgcacggtaatggagttgagccaggactgtcccataatgcgcccggaaatggtgctgtacggcagccagacgcgcaggatcttgctgctgccaaacatggactgtttctcttccgccacaccaatcaccgtggcgggcatgttacccaccaggatcacttcccccaccacacgggttttattggggaaaagctgtctgcgcgagttagcgtctaacaccaccacctgcgccctgcccgccagctgttccgcgttgaaggtcgccccttcgctgaaggtcatgccgtagacgttgaagtaatctccgctgacgccgttagcgctggccgccacgtcgatgttgccgtagcgcagacgcaggttttgcgacacggcaggcgtggcggagttcacccacggctgcttctgaatagccgccagatcgtcgtatttcagcgcctgctgatactgcggctcgtcgtcgccaaaatctttgccggggtaaacgtcgatggtgttagtcccgatggcgcgaatatccgccagcaccagctgtttcgccgcatcgcccacaaccacaatcgacaccaccgaggcaataccgataatgatgccgagcatggtcagcagggtgcgcattttgttggccgccatcgccagccaggccatggtcagcgcttcacgaaagccgctggagaactgtccccagccggtggacgcaggtaaggcttctttcggcgccgccgctctggactgacgtggcggcgggttgctgaccagctcgccgtcgtggatctcaatgatgcgttccgcctgcgctgccacctgcggatcgtgggtgacaataatcaccgtatgcccctgatcgcgcagctgatgcaggatcgccatcacctcttcaccggaatggctgtcgagcgcaccggttggctcatcagcgaggatcacctgtccgccgttcatcagcgcgcgggcaatactcacgcgctgctgctgaccgcctgaaagctgcgaaggctgataatcaacacgctccgccagcccaagacgcgttaacagcgccttcgcgcgttcaaggcgttttttgcgctcgacgcccgcatacaccgccggcacctccacgttctgcgccgcgctcaggtgtgaaagcagatggtaacgctgaaaaataaagccaaaatgctcgcgacgcagcttcgccagcgcgtcgccgtccagggtggaaacatccgtcccggccacgcgataggtgccgctggtgggcttatccagacagccaagaatgttcatcagcgttgatttacccgagcccgacgccccgacaatcgccaccatctcaccggcttcaacgcgcagggagatgcccttcagcacctccaccggcccgtcgccggacggatagctgcgacgaatgtcattcagctcaagcagcgccgtcattgcgcggctccgggcagggtttcgctggtgaccacttcctcaccctcttccagcccttttaccaccaccacatcggtgtcgttacgtgcgccaatcaccacttcccgctcgcggctttcgccgttgcgcagcactttcaccttgtagcgattgtccccggcggattcacccagcgcggagagcggaaccgtcagcacgtttttcacgccggtcagctggatatgcacctgggcggtcatgtccagacgcagcacgccctgcgggtttggcacctcaaaacgcgcatagtagaagatagcgtcgttgaccttctccggcgtcggcaggatatctttcagcaccccttcatagcgggtttgcggatcgcccagcaccgtaaaccaggctttctgccccggcttaaggtgaatgacgtccgcttcggatacctgggctttcaccagcatggtgctcatatccgccagggtcaggatgttcggcgcctgctgcgcggcgatgaccgtctggccttgcagggtggttatctgcgtcacttccccggccattggcgcaacgatttgcgtgtaatcgaggttggttttcgccgtatccagcgaggcctgattccgtttgatttgcgcatcgatggtgccaatctgcgcctgcttcaccgccagctccgtggcggctgtgtccagatcctgtttcgagatagcctgcgttttcgccagcgcctgctggcgcgtcagggtgacctgagcgagattacgctccgcctgagcctgcgcgcgctgcgcgcgcagctccatcagcgtcgcttccacttcgcggatttggttttgcgcctgctcaggatcgatcacgcccagcagctggccttttttaaccttatcgccaatctcaactgacagggttttaagctgaccgctgacctgcgcgcccacgtcaaccttacgcagggcatccagtttccccgtcgccagcacgttttgttgcagctcgcccggacgaacaatcagcgtttgatactgtggtaccggcgcgttcagtaccttccataaccagaatccgcccgctaacaccactaccgccagcagcagaaacagctttctgcgttttcccttcaggttcataaatattccaaataattgttctggctatcatcaccgttgattttatctaaaccactcctcaacgaaacccccgatccccgtaatcgtcgggaattgtttacccgatgttgataaagcgcctgctgaaatagcgatattccaccagaagcaggatctaacatgtcttccatcgtcgatacaccttattcaacgctgccccagcctaaatcgggctggcaactgtttaaaagcctggcatcgggttccctcacgccggggctggcgtggcaaaatccggcctatcgacgtaagtttatgttgcgctcgctggcaacgccgttcaccactgcgcgcctgcttggaaaccttgcaaaacagccccgtctgatgcagatcctgcgcgtgcagcccggcctgccgtgccgcctgcaccggccgtggctgaccgtcaatatgggccgccagactacgctggacgnnnnnnnnnnnnnnnnnnnnnnnnnnnnnnnnnnnnnnnnnnnnnnnnnnnnnnnnnnnnnnnnnnnnnnnnnnnnnnnnnnnnnnnnnnnnnnnnnnnnnnnnnnnnnnnnnnnnnnnnnnnnnnnnnnnnnnnnnnnnnnnnnnnnnnnnnnnnnnnnnnnnnnnnnnnnnnnnnnnnnnnnnnnnnnnnnnnnnnnnnnnnnnnnnnnnnnnnnnnnnnnnnnnnnnnnnnnnnnnnnnnnnnnnnnnnnnnnnnnnnnnnnnnnnnnnnnnnnnnnnnnnnnnnnnnnnnnnnnnnnnnnnnnnnnnnnnnnnnnnnnnnnnnncgctggacgcactgaacgatcactatgagatgatgagccgccatcttccggcgtcgctgctgaacggctacctctccagccagggcatcacgctggtgacgttaacgggcaaagaggagcagcagtttagcgttcgcctgagcgcggatgcgtttctggacaaagaaggggaagcgaccctcactttttgcgaccaccagaacacggtgctggccgagctgacctttacgctgtgcacataccagggcaagccaacgctcttcatcggcggaatgcagggggcgaaagcgcatgtcccgcacgagcacattcagctggcgaccaaagcctgtcacggactgttcccaaaacgtctgctggttgaagcggtcatgacgctggcaggcgccttcccggtcgagcagatcctcgcggtgagtaacgccacccacatctaccgcagctggcgctatcgcaagaaaaaagagggaaaattgctggctgactatgacagcttctggcgctcccttggcggacagcagcaggataacggcaactttgccctgccactgaccatgccacgcaaaccgatggaagagattgcgagtaaaaaacggtccgaataccgccgccgctatgccctgcttgatagcctgatccaacaggtttcgcaggcgactgcccgttaatcggccctcccgcgagccagccagaggacgcgggagaacattttacgcagcagcgtgggcaccgactccacgcctcgcctgcccgcttccgtcgcaacttcaatggccaaatccggttttgacgaccgatggatagctttggcaatcacccggcgcatattcatgggcacatctaccgggatcatcgccacgcggtgaaagacgtcgtcaaatccctggcggtacataaagtgctccatgtccatcgcaggcagcgcggtcagatgttcccgctcctcttcacgatcgttattgagcaggctgcgcacggtcgccgcatattttttacctgcctcatcgccatccaccagtacgtgccactctatccccatccggcgcgcaaatttgatcagcggttttaagccagactgagcaaattcgatcactttgatcccttcggcatcaaagtggtgtccgcactggcgagccagctcgtttatcacccaggtttccgtttccccttccaccagcaaccagcagcgggcaaacagggaagaggcacggttaaaacggatatgaaacgcaattcgtcggccatcttcggcatttaacccgccgggcccgagccggtaggcggtgacccgcgaggattcacgcaccaggcggcagacatactccaccggcgtcagagagagcagctctccggaattcgtggtggtgactcgctgcaacggcagcaaattaagaagatgccacgccacggaaagcataatcgggtgcagccgcgtttccggatcttccaccagcagcagcgggcgcgcgtcccgatccaggcgcaccgtccctttcgcctgtaaaagcgtggagaataatcccagcaggatcacccgatgcgtgcgcccgccggggcggtcgatcatgcggttgataatatcgagatagcgccagcttcgttgttcatcgtgcgagcggcgacgcatcagacggtggcgcgcctgccccgttccctgctcggagaaatagtgctccagcagttgcaccatggcagacagtccctgacggatctggccgtcggtgaggttctgcggccgtgagaccagttcacgggcgaggaaatccagttcgcgggcggtcacctccacctcgggcatattcggcacggtgccgttacggatccgccgcataaagcgcgcgtctcgtaagcgcagcacgggggagaggcggataagatggcgggcaagctcgtcaatattatcgagcgggatcggatttcccttctcattaagaaattcacgcagggttaacaccccgtcgttttgcgccatttcgccctcaaggcgatagaaaatacgctggaaaccatcttcacagggcacccagcagggcgacatagggcgaaaacgacgcacgcgatggcgaccgggctcggattcgcggaaggtcagaatgatatgcaggtgtttctcgcgtccgttgacatcccccggcggaaaccagaagtcatcatgaacgaagtggtacaagttctcttcgggcgaaagtagcagcgtcagggcatccagcaggctggatttaccccaggcattttcgcctatcaggacgttgttctgttccagttgcagcgacaggcggttaatcccgcgaaacccgacaatctccacacgttcgagtagcatacatcccccgcaattcggccactttttccttcaagttatcagcagtatagcggcaggctgtgggtcacgacagcagaatatacgcccccttaattattgggctatgctcttattacctccgatctgaacaaggattgacatcacattgccttaaatcaaatttagtgaatttatttgagtggcgaagggatgttgatggtttcaaaatactggctctttgagtcgtcatccctttatggcgatataacccgcgcgcaggaatgggcgcggacgtttattattgaggtggttatgttcagaaaattagcggcagaatgctttggtacattctggctggtgtttggtggctgcggtagcgcagtactggcagccgcatttccggaattaggtattggctttgtcggcgtcgcgctggcattcggtttaactgtattaaccatggcattcgccgtggggcatatttccggcggtcatttcaacccggccgtcacattaggattatgggcgggcggacgtttcccggcgaaagatattattggctatattattgcccaggttattggcggtattattgccgcggcggtgctgtacgtaattgccagcggaaaagccgggtttgacgccgcggccagcggatttgcgtcgaacggcttcggcgaacactctccaggcggctactcgatgctgtctgccatcgtgattgaaattgtgctcaccgcaggcttcctgttggtgatccacggcgcaacggacaaatacgcgcctgcgggctttgcccccatcgctattggtctggcgttgacgctgatccacctcatctccattccggtgaccaacacctccgttaacccggcgcgcagcaccgcggtggctattttccagggcggctgggcgcttgaacagctgtggctgttctgggtgatgcctattatcggcggtattctgggcggcgtgctgtatcgcaccctgctggaaaaacgcgattaattaagtgcggcctgtaatgtcgggtggcgctaaagcttacccgacctnnnnnnnnnnnnnnnnnnnnnnnnnnnnnnnnnnnnnnnnnnnnnnnnnnnnnnnnnnnnnnnnnnnnnnnnnnnnnnnnnnnnnnnnnnnnnnnnnnnnnnnnnnnnnnnnnnnnnnnnnnnnnnnnnnnnnnnnnnnnnnnnnnnnnnnnnnnnnnnnnnnnnnnnnnnnnnnnnnnnnnnnnnnnnnnnnnnnnnnnnnnnnnnnnnnnnnnnnnnnnnnnnnnnnnnnnnnnnnnnnnnnnnnnnnnnnnnnnnnnnnnnnnnnnnnnnnnnnnnnnnnnnnnnnnnnnnnnnnnnnnnnnnnnnnnnnnnnnnnnnnnnnnnnnnngctttactgtacagcctttattgggtagtgtctctggcgcttaacgaaaactcaaaaggaccggctgttcatgttctcaggactcctcatcattcttctgcccctgattgtgggctaccttattccgctgcgtcatgaatcggccttaaagcttattaatcgctttctcagctggattgtttacgtcattctattctttatggggatcagcctggccttcctggataatctggcgacgaacttgctttccatcctgcattattctgcggttacggtagtggttattctgctgtgcaatattgctgcgctgttctggctggaacgcactattccctggaaaaatcaccaccatcaggaaaagcttccctcccgtattgcgatggcgctggaatcattaaaactgtgcggcgtggtggtactcggttttttactgggtctgaccggctgggcatttttacagcacgcaacggaagccagcgaatatacgcttattttcctgctcttcctgattggtattcagctgcgaaataatggcatgacgctgaaacagattgtccttaaccgccggggcatgatggttgccgttatcgttgtggccagctcactggcggggggagtgattaacgcctttattctcgatctgccgctgaaaaccagcctggcgatggcgtccggtttcggctggtattcgctctccggtattctgctgaccgaatcgtttggtccggtgatcggcagcgccgccttctttaacgatctggcgcgcgagctgatagccatcatgctgatccccggcctggtacgccgcagccgctctaccgcgctgggcctgtgcggggccacctcaatggactttaccctgccggtgttacagcgctcgggaggactggagatggttcctgccgccatcgtacacggctttattctgagcctgctggtccccattctgatggcgttcttctcagcctgatactgctttggcggtagtgaacctgccgccaaaattgcgctaaatcaataaccctccacttagtataagaaagcacttttctccgttgtggcacaggcataaccttaaacatgtatctcaaatataactttaacaggtgtgattatgttttgtgtgcaatgtgaacaaaccatccgtaccccagcaggcaacggctgctcttacgcgcagggtatgtgcggcaaaaccgcagaaacgtccgatctccaggatctgctgattgcggcgctgcaaggcttgtccgcctgggccttcaaagcccgtgaatatggcattgttgatcactatgtcgacagctttgcgccgcgcgcatttttctccacgctgactaacgttaacttcgattctccacgcattgtgggctatgcccgcgaagcgattgccctgcgtgaagccctgaaagcgcagtgcctgaatgccgacgccagcgcccgcgtggacaacccgatggcggagctacagctggtgagcgacgacctgggcgagctacagcgtcaggccgcagaatttactcccaataaagacaaagcggcgattggcgaaaacatcctcggcctgcgcctgctatgcctgtacggtctgaaaggtgctgcggcctatatggaacacgcgcacgtactcggccagtacgacaacgctatttacgcccagtaccacaaaatcatggcctggctgggcacctggccttccgatatgaacgccctgctggaatgctcgatggaaatcggccagatgaacttcaaagtgatgagcattctggatgccggtgaaaccagcacctacggccacccaacgccaacgcaggtcaacgtcaaagcgaccgaaggcaaatgcatcctgatctccggtcatgacctgaaagatctctacaacctgctgaagcagaccgaaggcaccggcgttaacgtttatacccacggcgaaatgctgcccgcgcacggctacccggagctgcgtaaatttaagcatctgatcggtaactacggcagcggctggcagaaccagcaggtggagtttgcccgcttccctggcccaatcgtcatgacctctaactgcatcatcgacccgaccgtcggcgcgtatgacgaccgtatctggacccgcagcatcgtcggctggccgggcgtgagccaccttgaaggcgacgatttcggtccggttatcgctcaggcgcagcagatggcaggcttcccgtacagcgaaattccacacctcatcaccgtcggttttggtcgtgaaaccctgctgggtgcggcggattccctgattgacctcgtcagccgtgaaaaactgcgtcacatcttcctgatcggcggctgtgacggcgcgcgcggggaacgtaactacttcaccgatttcgccacccgcgtaccggaagactgtctgatcctgaccctggcctgcggtaagtaccgtttcaacaagctggacttcggcaacatcgaaggtctgccgcgcctggtggatgcgggtcagtgtaacgatgcgtattcagccatcattctggcggtcacgttggcagagaaactgggctgcggcgtgaacgatctgccgctgtcgctggtgctctcctggttcgagcagaaagcgatcgttatcctgttgaccctgctctctctcggcgtgaccaacatcgtcaccgggccgaccgcgccaggcttcctgacgccggacctgctggccatcctgaacgagaaatttggtctgcgttctgtgaccaacgttgaagatgatatgaagcaacttctgagcgcgtaaggagtaactcatgaccatgccaacctcacaatgtccgtggcggatgcaggttcatcacatccatcaggagacgccggatgtgtggacgctgtcgctgctgtgccatgactattacccgtaccgcgcgggccagtatgcgctggtgagcgtgcgtaattcggcggatactctgcgcgcctacacgatctcctccacgccgggcgtgagcgagtacattacgctcaccgttcgtcgtattgatgacggcgcaggatccgagtggctgacccgggacgtgaagcgcggggattacatctggctgtctgacgcgcagggcgagtttacctgtgacgacaagacggaagataaattcctgctgctggcggcgggttgtggcgtgacgccgattatgtcgatgcgtcgctggctggcgaaataccgacctcaggccaacgtgcaggtgattttcagcgttcgttccccggaagatgtgatttttgccgaagaatggcgcaactatccggtgacgctggtggccgagcacaacgcgacgcacggttttgtcgcggggcgcctgagccgcgagctgctgcaaagcgtgccggatattgcgaaccgcatcgtgatgacctgcggcccggcgccgtacatggagatcgtggagaaagaagtgaaagcgctcggcgtgacccgcttcttcaaagagcagttcttcacgcctgtagcggaagcggcgactagcgggatgaagttcacgaagctgcaaccggcgcagaccttctttggccgcgtgggcaccacgctgcttgaagcgctggaaagcaacaacgtaccggtggcagcggcctgtcgcgccggggtgtgcggatgttgcaagaccaaagtggtttccggtgagtacacggtcaccagcaccatgacgctgaccgacgcagaaatcgcagaaggctatgtgctggcatgttcgtgccatccgcagggcgatcttgtgctcgcataatctgtcgtggttcacctgtaggcccggtaagcaccagcgccaccgggcttttttgtccgtgcaggccagctcatttgcctttgtaactcctgtaggcccggtaagcgtcagcgccaccgggctttttgccgggtggcactacgtttacccggcctacgttgtgcctactgcctgtgcggcagcccgttatttgtttgactttgccaggcgcgtcgcgcagaaaaaccatctggacttaaagaatactgagcaggcaatacagcgactttcttctaagcttgtaagcgatatcacataaaggagacggacaaccatgaaacaaactgtggctgcatacatagcgaaaacccttgagcaggctggcgtaaagcnnnnnnnnnnnnnnnnnnnnnnnnnnnnnnnnnnnnnnnnnnnnnnnnnnnnnnnnnnnnnnnnnnnnnnnnnnnnnnnnnnnnnnnnnnnnnnnnnnnnnnnnnnnnnnnnnnnnnnnnnnnnnnnnnnnnnnnnnnnnnnnnnnnnnnnnnnnnnnnnnnnnnnnnnnnnnnnnnnnnnnnnnnnnnnnnnnnnnnnnnnnnnnnnnnnnnnnnnnnnnnnnnnnnnnnnnnnnnnnnnnnnnnnnnnnnnnnnnnnnnnnnnnnnnnnnnnnnnnnnnnnnnnnnnnnnnnnnnnnnnnnnnnnnnnnnnnnnnnnnnnnnnnnnnnnnnnnnnnnnnnnnnnnnnnnnnnnnnnnnnnnnnnnnnnnnnnnnnnnnnnnnnnnnnnnnnnnnnnnnnnnnnnnnnnnnnnnnnnnnnnnnnnnnnnnnnnnnnnnnnnnnnnnnnnnnnnnnnnnnnnnnnnnnnnnnnnnnnnnnnnnnnnnnnnnnnnnnnnnnnnnnnnnnnnnnnnnnnnnnnnnnnnnnnnnnnnnnnnnnnnnnnnnnnnnnnnnnnnnnnnnnnnnnnntcggcacccagttcccgtaccgcgcgttctacccgacggatgccaaaattatccagatcgacattaatcccggcagcatcggcgcgcacagcaaggtggatatggcgcttatcggcgatatcaaatccaccctcgccgccctgctgccgctgctggaagaaaaaacggaccgcaaattcctcgataaagccctgagcgattatcgcgatgcgcgcaaggggctggacgatctcgccaaaccgagcgaaaaagcgatccacccgcagtatctggcgcagcagatcagccacttcgccgacgacgatgccatcttcacctgcgacgtaggaacgcccaccgtctgggctgcgcgctatctgaaaatgaacggcaaacgtcgcctgcttgggtcgttcaaccatggctcaatggccaacgccatgccgcaggcgctgggcgcaaaggcgacggcaccggaacgtcaggtggtggcgatgtgcggcgacggcgggttcagtatgctgatgggggatttcctgtcggtggcgcagatgaagcttccgctcaaaatcgtggtctttaacaacagcgttctgggcttcgtggcgatggagatgaaggccggaggctacctcacggacggcaccgaactgcacgacaccaacttcgcacgcatcgccgaagcctgcggtatcaccggtattcgggtggagaaagcctcagaggtggacgacgccctgcaacgcgccttcgccatcgacggcccggtgctggtggatgtggtggtcgccaaagaagagctggcgatcccgcctcagatcaagctggaacaggccaaaggttttagcctctacatgctgcgcgccatcatcagcgggcgcggtgacgaagtgatcgaactggcaaaaaccaactggctcaggtaaaacatttcacaagacctcttaaattaaagggatgtgaaatgattgatttacgtagtgataccgttacccgtccgggccgcgccatgctcgaagagatgatggccgccccggtcggggacgacgtctacggcgatgacccgacggtcaacgaactccagcgctatgcggcagagctgagcggtaaagaggctgccctgttcctgcccaccggcacgcaggctaacctggtggcgctgctcagccactgcgagcgcggcgaggagtatatcgtcggccagggggcgcataactacctgtacgaagccggcggtgcggcggtgcttggcagcatccagccgcagccgatcgatgccgcacccgacggtacgctgccgctggacaaagtcgcggcgaaaatcaaagccgacgatattcacttcgcccgcactaaactgctgagcctcgaaaacacccataacggtaaagtcctgccgcgcgaatacctgaaagcggcatgggactttacccgcgagcgtaagctcggcctgcacgttgacggcgcacgtatcttcaacgccgtggtggagtacggctgcgagctgaaagcgatcacccaatattgcgactcgttcaccatttgcctctctaaagggctgggtacgccggtaggttccctgctggttggcagcgcggactacatcaggcgcgccaaccgctggcgcaaaatgaccggcggcgggatgcgtcaggcgggtattctggcggctgccggactgtacgccctgaaaaataacgtgtcacgcctgaaagacgatcacgacaatgcggcgtggatggcagcgcagctgcgtgaaatcggcgctgatgtcatgcgtcacgacactaacatgctgtttgtccgcgtcggcgatgagcatgctgccgcgctgggcgactttatgaaagcccgaggcgtgctgattaacgcctccccggtcgtacggctggtgatgcaccttgacgttaaccgcgagcagctgaccgaggtggtgaaacactggcaggcgtttttacagcgttaaggagcataccgtgccgcaacgtattctggtgctcggcgccagcgggtatatcggtcagcatctgaccactgcgttaagccagcaggggcaccaggtgctggcagcggcacgcaacacggaacgcctgcaaaagctacatttgcctggcgtgacgtgtcacaacgttgaccttagctggccgaaagcgcttcctgcgctgctggaaggggtcgatacgctttactaccttgtccacagcatgggcgaaggcggcgattttatcgcccacgagcgtcaggtggcgatgaacgttcgtgatgcgctgctgcaaacgccggtgaagcaggtgattttttttaagctcgctccaggcgcctgagcacgagcagtcagaccatctgcgcgcccgacagctgacggcagaaacgctgcggagcgcccgtatccccgttaccgaactgcgggcagggatcatcgtcggcgcgggttccgccgcgttcgaagtgatgcgcgatatggtctacaacctgcccgtgctgacgccgccgcgctgggtacgctcgcgcaccacgcccattgcgctggagaatttactccattatctggtggcattgctggatcacccggcggagcagcatcgcgtgctggaggcggcaggtccggaagtgctgagctaccaggcgcagttcgaacattttatgcgggtgagtggccgccaccgctggctgatccccatccccttcccgacccgctggatatcggtgtggtttttgaatgtgatcacctccgtgccgccgacgaccgccaaagcgcttatccaggggttgaagcacgatctgctggcggacgatctcgcgctgcgcgccttaattccccaggaactcatccgctttgacgacgcggtgcgcaacacgctgaaagaggaagagaagctggtgaactccagcgactggggttatgacgcgcaggcgtttgcccgctggcggcccgagtacggctattatccgaaacaggcgggctgtacggtaaaaaccacggccagcctggcagcgctgtgggaagttgtgaaccagatcggcggcaaagagcgctatttcttcggcaatattctgtggcaaacgcgcggcgcgctggatctgctggtcggtcaccggctggcaaaaggccgccctgcccatccctggctgaaggtgggcgataccgtcgacagctggaaagtgattattgttgagccggaaaaacagctggcgctgctgtttggcatgaaggcgccggggctggggcggctctgcttcaccctcaaggacaacggcgaccatcgtgaactggacgttcgggcatggtggcatccgcacggaatgccgggtctgttttactggttgctgatgatcccggcacacctgtttatcttccgcggaatggcgaaacggattgcgcaactggcagaagaaaagcgggaaaataactaaataaaactcttaatctttcacctttcccattgcaacacatcgtaattcacgaaagaatgcgcacgaaattcttttcaacacagtggattgttatgaaggtactggttaccggggcgaccagcggcttaggccgaaatgcggtcgagtttctgcgcaacaaaggcatcagcgtgagggccaccggtcgcaatgaggcgatgggtaagctcctgcaaaaaatgggcgctgaatttgtccatgccgatctgacggagctggtctcctctcaggccaaggtgatgctcgccggtatcgatacgctgtggcactgctccagttttacctccccgtggggtacccaggaagcttttgatctcgctaacgtgcgcgccacgcgtcgtctgggcgaatgggccgtcgcctggggcgtgcgtaactttattcatatctcctccccgtcgctctatttcgactatcaccaccatcgtgatattcaggaagatttccgcccggcgcgcttcgcctgtgagtttgcccgcagcaaagcggcgggcgaagaggtgatcgatctgctggcccagtcaaacccgcacacccgctttaccgtgctgcgtccgcagagcctgtttgggccgcacgacaaagtctttatcccgcgactggcccagatgatgcaccactacggcagcgtgctgttaccgcgcggcggcgatgcgctggtggacatgacctattacgaaaatgccgttcacgccatgtggctggcgagccagccggaatgcgataagctggtgtcgggccgcgcgtacaacatcaccaacggcgaaccctgtaccctgcgcagcattgtgcaaaggctgattgacgagttaaaaatcgactgccggatccgttctgttccttacccgatgctggacatgattgcccgcagcatggagcgctttggcagtaaatcggcgaaagagcctgcgctgacgcattacggtgtgtcgaagctcaactttgattttacgctggatatttcgcgggcggagaacgagctgggatataaaccgattgtatcgctggatgaagggatagtgcgtacggcggcgtggttacgggatcacgggaagttgcaccggtaagcgttccagcctcatgtaggccgggtaagcgcagcgccacccggcaaaaaacagagagtgcggactgatgccttcaccccggccctctcccacagggagagggtgcaaacactaaaacggcaaccctgggggttgccgtttgctgtttataaggccgtccaggcttcagcccatgccagacctgcgccaggttcatagtacgtcggcgcattgttacaccagccgctgtacgggaacggtttgcactggaacagtttaccatggttgttcaagatatcaccggcattgtacttgctgttcgcgctccatgccgggtaagacgtatcttctccggatggcgttgccgctttcgctttcacgttcagcaggtaagatgtggtgctgctcagttcgccatcgctgacggtcaggctcacttcatactgctgcgccgtcgcagactctggtgctgtaaaggtcacaaccgctttgtcctgaccggtaacagtctgaccatcctgggaacgccaggtatacgtcagcgtgttaccatctggatcggtagagccttcggcgctcagagaaacctgcgcacccgcttccactgcaccgatcggaccggcaatctgcgcaaccggcgcgtggttcaccacaaccggcgtttcatccggcgttggggttggtgccggcgtttcatcgtcggatggcgtcggtgttggcgtgaccggcgtttcgtccggggtctcggaagaaccctcgtcgttaacaattttcacgttaaagaagtgctgcacgcacttgctgtagtcaccgtctttaaatgcgctgaacggggtctggtaacccaccagctggcaagagtaggttttgccgtccggggtatccgcgctccatccccagtcctgttcccagtaaatcttcagggcgcctgcgccaccttcgtcgaactgcttcatgttagcgcaacccaacacttcgttcgccggaacaggcactttcaggtagttcgcgaactctttgtaatacttgatacggttttgagactgcgcaatttcagtcgggccgccgcactcaacgccgccgttgatgatctgggtggtcacaccaaagcccggaaccagaccgttggctttatcgtggtcgttcggctgccatgtaccgtcgatcacctgcaacatgcttggttttggcggctgcggataggcgaagaagaagatcgcactcgccaggttcagccaggtgtccgccaccagctcaggtttgtcgagcagcgtacgcacgtcaccgtacatcgcttcagagaatggaccgtagttgtaattgtaggacaactgtttcgcaccacgaccgaagtagctcaggaaatcgccgtctttatctttaccgcaaggccaggtctgcccctgccagacgtccgggttacattcgccgttataaccgcccttctgcccttcgctccagcccatttcacgtacgtggaccagcgcctgacgccattcggcttccggacgccagctttcgtggccgccggtctcctgggcaaagtgggcaaacatggtggccagctctttgcggcagatggcgtcgctgtcacgaccgtcattgtaggtcttacacagcgccgggaatttacccacggctttcaggaagttgctgtaggtataggcctgcgcgcgcagcgggaagagatattcccagtcgctggctttcacaatcccttcaacgcgcttaacgttgtccgggttcgccgcccggcctggctcaatcaattcaacctgcgcgttatccagcgtctggatggtctctttaaccgaagccatcagcgggaagtccgtcagttccttctctttcttcgccagatcgctggctttgatggtgtacggctcactgctggtctccttcaggttagcagcctgagccatgagtggcgccacgcaggctcccgcaatgagtacactcagtaacgtccttttgttcatttcagttttcctgttcgtttaaaattaaatgttaaaatcccggcttaggtattactccgttaatacataaaccacattcagctgttttcacttttcgaagaacaccttcaggaattcttcaaaaataaaaaacgttaataacgtgctgctaatttcagttgctgatatttggcccagaccttatgggcatatttcatcctctgcggataattttcttttttcagtccggcgttatacgcgccaacggcttcccagttatagccatacaccctgatcatcccggcaaggatagaagccccgaccatgatcgaggtacacggctccgtgattaaccggtattcgtcgattcctctgctttccagcgcggtaaaatgcgaactgttgatttgcatcagcccgacatcccgcgtgccatcgcggttttgcccaatcgcatacggattcattccggattccacattcgctatcgcgtacagtaaataagggtcgacatgataataatgcgccgctttattccaacagtttgccagagcgctttggcttattatcaataacaacaaaatcaactttttcatttttacctgctgacagtttcggttatttctccttaccaacatcctgtaaaatgaattttgaatcactccccctctaaaagggggagtcattaatgggttagattatttgcagtctgttgatgcgccttcttttacccatacgtcgctgttggctggattatcaccacgggtccaccatttcgcacggtaaacgtttccttcataggtggtggtgtcgccgccgttgtagaccaggtcagaacgccagttcatcttcacgttgcttaccagctcccatgcatccacaccgaagccaggctgattgccctgagtccagtacttcgctttccacaccagatggtcgaagcttacggtatcgccaccgttgtagattttgctggattcccatgccgcatatttgctggcgttagcatccacaggtgcatcgcagctccctttgtcagacggtggagtcacatcatcagccggaggggtaacgtcatccgccgggttagtgtcttcgtcatctggcacaggtgcaggcgccgctttcggattcacggtgacctggacgttagactgcacgctggtcttaccgtcgctcaccaccacgctcagggtgtaggtagacgtcgagctcacttccggcgcagtgatgttcacgttcgcggagtcagtcccggtagcgtgcatatctgctggtacactccaggcgtaggtcaacgcatctccgtctggatccgcggcctgggcatgcagcgcataggtttcacctgattcaagcgtgatcgcttccattgggtttaaaaccggtgcctggttagctttcggcgccttgttcaccacctggatatcaatcgcgttgctcaggccttttgcatcggtcaccgtcaggcggaacaccatggtctggtcggacgtcgcggcggcaacgttaaaggtcgctttcgctttggtgctgttggtgatggtgacagacggaccagagacctgagtccatttgtaggtaatcgcatcgccatcaggatcgcttgaagcagagccatcgagcgtgacggttaccgggccagacacgttctgatcggcagaggacgcgattggcgcgtggttggtgacctccggatcaaccggcgtagcgtcgccgcccagcaggctttcgttcatcgcgttcaggatgtcaccggtgtcagagtcgatagaccatgcgaacaggccacccagtttattcgccagaacatacttacctttcgccgtggttgaacgcgcatcttcatacgtgatcaggtcgccggtagttttgttgaagacgtaaggggcttccgcatcagcgtcgtagccgtattcccagcctggtttgcctttgtattcgttaacgatctgacgatagtcaaccacgccgggttcccaggtccctttcaccatacctgtagcggtgccggtgaatggattgttaccggtgtagccatgcacgccggtccagccgcggccatacattcccgcacccaccacgatcttgcctggctgtacgccctgggaaagcagcgcgttaacgccattttcagtggtgtagtcagtgtccggacgccatgctggcgcgcgcagcgccgcctggtggccgagaacggtgttgctccagccgccgtagaagtcatagctcatcaggaagatgtggtcgaggtactgctgagcggcagtgtaatccacgtcttcgatcttatcgcggcctgcaccgattgcgctggtcagttcataggtacggcccgtctgtgcagacagctcgttcagcatggtgcgcaggtcgtgcatcagcgcggtataggtcgctttatcctgctgcggattgccaaggttttcgctcacaccgccgccgccagggaattcccagtcgatatccacgccgtcaaagaatttccaggtctggaggaactctttcacagaagagacaaagcgtgcgcggatagccgggtcacccatgtggaagaagggatcggagagcgtccagccgccgatagatggcagcactttcaggtccggatgcgcttttttcagcgccatcagctggccaaagttacctttatacgggtcgtcccagccggagacgccagcctgtggtttttgcagcgcagcccatgggtcgtggatcgccacggtatagtcaggtcggcccttacagtcgttctggagcacgcggaagctgttgccgccttcaatggttttcaggccgtcgttgatgccgtcacctccacagattggaatgaagccgtaaagaatgtggttgaggtttgccgcagggatcttatcaaccgggaagttacggtcataaacgccccactccgggaagtaggccgcaaccactttatcggtatgcttcgcaaacgctttgttattctctttgagagacgtattcagcggcagcaggtggctaccgtcggtgtctgccacaataatcagcttgctggcgcttttcgcacagccgctggcgttacagacttcaacctgttcctgataacgcccaccttttttcactttaaacgttgcagagcccgtcgcgccggctgcgccggtccatacggtttgtccgtccagcagaactttcgctgaagttggcgcatcaccactccagacgttccactcaacttttacatccacgccatcgttatgcactttgacaagattgttataatcctgggctgcctgatccacttccaccagggcaaatttgtcattgccatagccgatcgtcggtgcacctggcgctgctgcaaatgcggagctggttgccgccgcaataaagagcgccagatattttggcttcataaatttcatttttatttcctgataaatttattcgtaacgtaataacccatgttttccgtgagatcatggatgcatttcgcgtaatgcgtatttaaccaacgtgagtgtcgtgaacaaaaaattgttgctgcgttgtattcctccattaaaagatacaagcccaaattccgtgtagcttatatcctttacgatacactgagcataaagagacgtccttctcttctaccatcgaaaaaactcataaaaaatcttgacctgtatatttaaaatgtgaaagcaaattgctgactcataaacacccctattccagcaaaggcgagataaggaccaaaagaaatagtgaggttatttttatttaaattatttacggcgaaataaccgacaataccgcttaacgctgccgccagttcaatggagggcaacgcctgccagccgcaccatgcgcccagcgccgccagtagcttaaaatccccgtaacccagaccttctcgtcccgtgatcagacgaaaagcccagtagagcagccagagcgacagatagcccgccaccgcgccgaacagcgcatcgcgtagcggcaacgtgtggtcaaacgcatggagcactaaccccgcccacagcagcggctgggtcaggcagtccggaagcagctgatgctgccagtcgatcatggccagcggcagtaaaaaagccgccagtaaccacaaagagaacagcgcctgaacgtccggcatgcaccaggccgtaatgccaaaaaacaaggcggagatcagttcgaccagaaagagtcgcagcgggatcgcgctgccgcactggtggcagcgcccccgtaataacagccagctgagcagcgggatgttttcccacgcggcaagcgcgtgctggcacaccggacagtgcgaggccggaaagagcagattgccactcccctcctcatccatcaccatccccggtacgcgctcggcgacaacgccaagaaaactgcccacaatgccgcccaggatcgcactcattatcgggaaccctaccgggcaggcgtcccgcatcagcgaaaaggtattcatgcgttttttgaccaggtgagctgcacctgcgcttttacgtcgctgaggtggtccaccggcgtgaggtttattttttgcagtctcacgccggaggtctgattaatttcacgcagccagctttttaattcataaacattcacccgattcaccacgaacgataaagtttgtccctcctggcgcatatccgtcagtgaaaggttaatttcatgggcgctgttctcgaccaccgtacgcggattattcgttttgactatctggacctgaagatgatttttatcaatttcactgcgcatccagttaagggtctctttttgtcttttaagcgtcgatttactattttgaatcatattatccagggggatcactcctgtgtaatacaccgctgcccccacaatagcaacggcacatatttttaaaataattttttcccgggtgctgtaattctgatagcgtgacttcagctgcgcgattcgctctttcatttatgtttccctgcgatcatggcggtatacggttcggttgttgaaacaggctgtaaggtaaaatcaaaattctcactggtctggttaacaaacgcctgcaacgcgggctggttttgcgcgctgacgctcagcgtcagggtgttttgctgcgcatcgtactccagcagttcgatctccatcgcagggactgactgccgggctttctccagctcatcaagctgaagaaagaatcccttgctctgttttttcaggctttgaccaaagtgatatttgatattggtctgctggcgcatgctggggaaatggtgctgataaacctggacgatctcctcctgcacccgattttcctgctgcacaagcatccaggccattgcaatgcgtggccccagcagcagagcaacagacagcacgcccgccgccaccatcgcggctttcatacttttcgccgcccgcccattaccggccttaaggctgaattcaccgtgaagcaggttaacgcggcaggtttgccactgcggctgaatcagtgccagcggatgctgccaggcatgctgcacgtcaacgtgcaccttcgcaggcgcatcgccgtaacaccacacttccccgaccccggctttctgcattaacagcggcagcagggttgcctccatttcacctgccacatggggcgataaacgcagccagtagctatcatcctgtgcgaccagcgtgctgccccctgtcgtcacgggtagcagccaggcatcaggcagggcctgaatcacgtttaatccggcctcctgacagcgggttaatgccgcgcgcaggcggtcggcgtcaatggccacggcgtcgacgtcggccccttttttgtggagtaccgtccagtggaggttgtccacgtcgccaatcagcgtctcttccgccatccacgagaaggccatcgcctgagaagccacctttttcggcagcgtaaaatggcggaaaatcatgtcgctggcgggcaacaggagacaaacgcgcgtagccagggggtgttcggccagcatctccaggctgtcgaccacctcgacgcgctcgctgccggactcacaccacattatttttccgccctcgcggctgtcgggacgaacaaaaagtacctgtttcataacgttctactttgcttattcaatcattcggtaacgacgctgccacgtcacgatctcaccggcttcgttattcacctgaagctggctgaccacgcgaagcgttaattcatcggtattgccggtgtaattcacgcggaagtaccggctgtttatagaaaattgatccgccacctgcgggagatcgtcttttaactgcgggaaggcctgctccagcgctttgctgaacgcttccatattttcccagcccgattccggacgcgcatccagcaggcgaacggcgtcatcccgcgtcagttttccggggaacatggccgccagcacggcggcctgttccggttgcagggtgttgacatcgaccttgctggcagcgtccggcagcgcgcataacagcttgctcaccttcggatacgccgtaacagggaacgccggcagcagtttgatttccgcgatgctgcgcatcatctgatttgccggttgccgcgcgggcacgacgccagcccacgcatcgctttcggccccctccttcgccgtggtgctgtcaccatcgagataatccaccagctggaaatagaccgcctccgccgtgcccgggctgaggccgctttccgtcaggagttgttcaacaatccgcgctttacgcgatttttccgccaccccgggagcgctttgcccctggggtgcgatgtcggcggtcaacaggttattgacgttaaagcagtcctgcgcatcttccacctggctcacgaccgtatagtcctcaccctgcgtctccagcggctgatgccagtcgccgtccagggccagtggcttgctctcgccgctggcgtcggtctgtaaccggtccttcaccactttttcctgggtctgcatcgcccagcgcagctgctgctggcttacctgataatgcgttttctgcaaattacggcagaactgctggctgattttggcagccagcgccgacatcatcaccagcaaaatcagcaccaccagcagggcgacgccatgttgttgacggatccgtttcatggtctggtctccggcgaaggcgctggcgccgcggcagcggccacctccggcatatcacccggtgtagtgaacacccagcgccaggtatccccgctttccatcgtcaacgtaacctccacgccgtccggcagatgggcggcgtcgtgccaggcggtcagccagccctgacgataaaaccgccactgcaatgattttacgccgctgacaatcggcacctcgtcaggcttaacgtccgccgggccgtcaatgaccggccagacgtcgcgatacaaacgcccctcttccagccgccagcgcacgcgctccagctggaccgttccgctcacgccattcagggtggtcagttcaagagcatcgccctcctgacgaaacagctccggctcattacgcggggcgcgcgcctgaagctggaaaaaatcacgctccatcagactccaggcgcgctgaagctggttgagctttgcggcgctggcatcggtggccgagctggtacgcatcgcgccgtccagaatttgccaggccagggtgctgatcaccgcgaagatagtcagcgcaatcatgatctccagcagggtaaatccgcgctggcgtcgcgttttcttcacttgctctctcccggcggaatgatgcgcagggagataaccggctggctctcatcgctttccgcatatacgcgtagggtattcgcccagacgttgtcggcggttttcacccgctgcttacgccagttccagctgcgcccgcccatgatttccgtcccctgctgttcagcatccgggaagtcagttctggtgagctgtgcctccgccagctggttttccgccacccaactggcctgcaaggtatcggccaggccatgggtaaaacgcacgttcagggagaccgagttcatcagtgccagcgcggcggtggagaaaatcaccagagcgaccatcacctccagcagcgtcatccccttttgctttttgttgccgttagccatcgttttctaccgataccggcgccgcaccgtgcgacaccacgcggaaatggtgctgtttgtcgtaactttgcagcgtcagcgtaaagcggctgatttcaccgtccggtaaaaagatcacctgcggctcggaggtcaccgtcgcggccaggcgctgcggcgaaagcgacacgtgcatctcttccggaaaatcacctttggtgttaatgcgtccggcagataatggcacccagtgacgctcgccatttttatcggcgatcgtcaccagctgatatttatcggtggcgatcaccagcccaacaatatttccgtccatcaccgcacggtctgaaccataatcaacgagcgcttttaattgctggccaaatatatccgcgccgctgcgcgaaggaatggtggataccaccatcatggcgcagctggcaaatatcaccagcgccagaataatttccagcaacgtaaagccgcgttgatttttcattatttctctttcttatcgagagaccagttggtaatgtcatcggcggtattggcttcgccgtccggaccggctgagaagacgtccaccgcgccgtgttcacccgggctcaccagaagataatcattgccccaggggtcctgcggcaggcgacggatatagccgtcagtgcggtagccgttcgggattggcgcgatttcaggtttggtcaccagcgcctgcaaaccctgctctgtggtcgggtagcggtggttatccagcttgtacatatccagcgagccttcgagcgcgacaatatcgctggttgctttttgcgtatcggctttttccttattgcccattaaatttggcaccaccatactcgccagtacgccgagaataacaatgaccaccattaattcgagcaatgtaaagcccgcctggcgagccaggtttttacgttttaaagccatgatttaacctaccatattattaagttgcagaagcggttgtaatattgacagaacgatgaataaaacaatcgtcgccatggataccaccagcgccggttcaaagaccgacagcgttaatgtaattcgatgttgtaaggccgattcctgattttccgccgcgcgatccattaaattacctaattccccgctctcttcaccggaggcaatcatatacagcatggtgggcgggaataatttcgcctgttccagcgccgcatacagcgacgccccctggcgcacggtgtcggcggcctgctccagcacctgccgggcatagcggttttcaataccgtccatcgcgatatacattccctccagcagcggcacgctactggcctgcaaaatgctcagggtacggatatagcgggcactgttgatggcgcagaccagctttttaatcggcgagccgttcaccagccagctgtgccaacgaaaacggtttttggcattcctcagccaggttttgaagccgataaagccgccccccagaatgcccacaatataaatgccccaggcttgcagnnnnnnnnnnnnnnnnnnnnnnnnnnnnnnnnnnnnnnnnnnnnnnnnnnnnnnnnnnnnnnnnnnnnnnnnnnnnnnnnnnnnnnnnnnnnnnnnnnnnnnnnnnnnnnnnnnnnnnnnnnnnnnnnnnnnnnnnnnnnnnnnnnnnnnnnnnnnnnnnnnnnnnnnnnnnnnnnnnnnnnnnnnnnnnnnnnnnnnnnnnnnnnnnnnnnnnnnnnnnnnnnnnnnnnnnnnnnnnnnnnnnnnnnnnnnnnnnnnnnnnnnnnnnnnnnnnnnnnnnnnnnnnnnnnnnnnnnnnnnnnnnnnnnnnnnnnnnnnnnnnnnnnnnnnnnnnnnnnnnnnnnnnnnnnnnnnnnnnnnnnnnnnnnnnnnnnnnnnnnnnnnnnnnnnnnnnnnnnnnnnnnnnnnnnnnnnnnnnnnnnnnnnnnnnnnnnnnnnnnnnnnnnnnnnnnnnnnnnnnnnnnnnnnnnnnnnnnnnnnnnnnnnnnnnnnnnnnnnnnnnnnnnnnnnnnnnnnnnnnnnnnnnnnnnnnnnnnnnnnnnnnnnnnnnnnnnnnnnnnnnnnnnnnnnnnnnnnnnnnnnnnnnnnnnnnnnnnnnnnnnnnnnnnnnnnnnnnnnnnnnnnnnnnnnnnnnnnnnnnnnnnnnnnnnnnnnnnnnnnnnnnnnnnnnnnnnnnnnnnnnnnnnnnnnnnnnnnnnnnnnnnnnnnnnnnnnnnnnnnnnnnnnnnnnnnnnnnnnnnnnnnnnnnnnnnnnnnnnnnnnnnnnnnnnnnnnnnnnnnnnnnnngccctaccccttccagctcgtactcaatcggatcttccacggtcagaatgttgcgttcgtggccgttcagcgccgaaagaatggcgtacagcgtggtacttttaccggaacccgtcgggccggtaacgaggatgatcccgtgcgggcggtcgatcagccctttcagcttctccagctcttcatcaatcagccccagcttgttgatgtcgggcttgagattgcttttatcgagcaggcgcatcaccacgcgctcgccgtactgggacggaatggtcgagacgcgcacgtcgatagccttgcgaccgatgcgcagggagatacggccatcctgcgggaggcgtttctcggcgatgtcgagtttcgacatcaccttgatacgcgacaccagcagcggggcgagcttacgcgccggttgcagcaccgggcgcagcacgccgtcaacgcgaaagcgtatgttcagggtgcgctcgaaggtttcgatatgaatatccgacgcgccgtccttcaccgcctcgccgagaatggcgttgatcaggcggatcaccggcgagttttcgtcgttatcgagcagatcttcgttatccgggatctcctcggttaacgccatcagatcgatatccgcgtccatgtcgtccaccagctgctgcgacacgccgctgctctgctgccagattttggccagcatctcgtcaaacgcttccggcgccagggtaaccgggacaaacgcgcgtcccagcacccggcgcacctccagcagcgctaacgccggggtgtcctcacggatatagacgtcattgttgtaaagcagaacgccgttttcttttgcgtagttgctgctacacagggttttagtcagttcgtccacgtttccccccgccttactctttaaacggattgcgtgccgcgtgggttttcacgggtgcagtgctggcggcaggaaacgctggcagtacggcgttgtcgctcggctcgacaataccgagctttttctcttccacgcgctgcatctggcgcacccggatctgatcatatttctctttcgaggctgcgctgtagttgtcgtcgtcacgcaggacggtggtatgaataaacaccatcaggttgcgtttggaagtatcctgcgaggtgtagcggaacagctgcccgaccagcgggatatcgccgagcagcggcactttggagaccgactgtttggtcacattttccatcaggccgccgagcaccaccgtctggccactgtggaccatcacttcgttattgatcgtgcgcgtgttgaaggttgggccgaggctggaatcttccgttgcgctgttgtcgacgctggatacttcctgctcaatcttcaggtggatcatgtcgccatcgttgatttgcggcacaatcttcagcttggtccccacggttttacgctcaaccgagttaaagacgttgtcgccgctggtggtttgcgaaccggaaagcaccggcacatcctgaccgacgttgaacgacgcttctttattatccagcgtgaccacgcttggcgtggagaggatgtcgtttttaccgtcggtggagagcgcggtcaccagcgcaccgaaatcaccgttaaagaagccggtcgcaaggcccgtgaagctcgcccctttcatggtgccatttttaatctggctgattggcaggccggtagcgccaaactgcacgccgccgtgcttgctggtccactgcacgccaagatccaggccgttgccgtcctgcacttcggcaatgatcgcttccaccagcacctgcggacggcgaatatccagcttgtcgatcaccttctccagggagttcatcacgttaggctgcgcggtgatcaccagggagttggtcgactcgtcggcggtaatattcaggtcggttgaggcgctcgcggttttcgctttggccgcgcccggcttgtctttcagctgctcgccaatccccgtcagcaccggtaccactttggtggcgctggcatatttgaggtagaagacgcgggtgttcccctcgttattctgctcgcgatccagctgatggataagggaacgggtacgcgcgcgcgcatcttccgagccgctgatcaccaggctattggtttcgtcatccgccaccaccttggtcgccagctgcggcgcattctgccccttctgctcttcgttgttgaggttattcaacatatccgaaagctctttggcagaggcaaagcgcagcgggatgatttcgcggcgctgaataccgtctttatcgacgcgctgaaccagatccaccaggcggttcaccaccgaggctttaccggttaacagcaggacgttggacggctcaaagtggaccacattcccgatgccggtggcatcgttgagctgacgcagcagcggggccagctcgcgaacgggtacgttttccatacgcaccacgcgggtgataatctcgtcacctttgcccgggttcttgctgtctgccagcggcgcaccggcggtacgcgctacgcttgagcgcaccactttgaccatgccgttgtccatcgggatcaccgacaggccgtagagatccagcacgctcaggaagaactggtaatactcatcctccgtcagcacgttgtaggttctgaccgagacggttccctggacggacggatcgaccagaatagttttgttgagattgcgacctaccgtatcgataaactcgcgaatatcagtatttttaaaacttgcgctaaagttagctgcaagcagcgaactggaatataacgacaatgcggtcagcgccacgcacgcccagggaaattttttcatgtctgcacacttattaattgtttagaacattaacccgaatattttcaaggtgagcgtgacgtcgtacgatgacctccgcttctttcattttcgaccagttggcaataatgcttttcgcttttgcttcatcggtcatatcgacagagttaacctgaatcgccacatcgcctttttccagacctgactgactgtaaaaggcggaggcattccttgggtttatcctgtagccttccagtcggcctttttcaatgatgggttttaacaccagataatcatcaagatgcacactctctgcgccagcatctttcgtcgattttgtaaccgggccgctctccacgccccccttaaaatagtccggtttatttaacgccagtacctgcgtagcaccttcataattaaccaccacattatctttgtttatttcctgaataaatnnnnnnnnnnnnnnnnnnnnnnnnnnnnnnnnnnnnnnnnnnnnnnnnnnnnnnnnnnnnnnnnnnnnnnnnnnnnnnnnnnnnnnnnnnnnnnnnnnnnnnnnnnnnnnnnnnnnnnnnnnnnnnnnnnnnnnnnnnnnnnnnnnnnnnnnnnnnnnnnnnnnnnnnnnnnnnnnnnnnnnnnnnnnnnnnnnnnnnnnnnnnnnnnnnnnnnnnnnnnnnnnnnnnnnnnnnnnnnnnnnnnnnnnnnnnnnnnnnnnnnnnnnnnnnnnnnnnnnnnnnnnnnnnnnnnnnnnnnnnnnnnnnnnnnnnnnnnnnnnnnnnnnnnnnnnnnnnnnnnnnnnnnnnnnnnnnnnnnnnnnnnnnnnnnnnnnnnnnnnnnnnnnnnnnnnnnnnnnnnnnnnnnnnnnnnnnnnnnnnnnnnnnnnnnnnnnnnnnnnnnnnnnnnnnnnnnnnnnnnnnnnnnnnnnnnnnnnnnnnnnnnnnnnnnnnnnnnnnnnnnnnnnnnnnnnnnnnnnnnnnnnnnnnnnnnnnnnnnnnnnnnnnnnnnnnnnnnnnnnnnnnnnnnnnnnnnnnnnnnnnnnnnnnnnnnnnnnnnnnnnnnnnnnnnnnnnnnnnnnnnnnnnnnnnnnnnnnnnnnnnnnnnnnnnnnnnnnnnnnnnnnnnnnnnnnnnnnnnnnnnnnnnnnnnnnnnnnnnnnnnnnnnnnnnnnnnnnnnnnnnnnnnnnnnnnnnnnnnnnnnnnnnnnnnnnnnnnnnnnnnnnnnnnnnnnnnnnnnnnnnnnnnnnnnnnnnnnnnnnnnnnnnnnnnnnnnnnnnnnnnnnnnnnnnnnnnnnnnnnnnnnnnnnnnnnnnnnnnnnnnnnnnnnnnnnnnnnnnnnnnnnnnnnnnnnnnnnnnnnnnnnnnnnnnnnnnnnnnnnnnnnnnnnnnnnnnnnnnnnnnnnnnnnnnnnnnnnnnnnnnnnnnnnnnnnnnnnnnnnnnnnnnnnnnnnnnnnnnnnnnnnnnnnnnnnnnnnnnnnnnnnnnnnnnnnnnnnnnnnnnnnnnnnnnnnnnnnnnnnnnnnnnnnnnnnnnnnnnnnnnnnnnnnnnnnnnnnnnnnnnnnnnnnnnnnnnnnnnnnnnnnnnnnnnnnnnnnnnnnnnnnnnnnnnnnnnnnnnnnnnnnnnnnnnnnnnnnnnnnnnnnnnnnnnnnnnnnnnnnnnnnnnnnnnnnnnnnnnnnnnnnnnnnnnnnnnnnnnnnnnnnnnnnnnnnnnnnnnnnnnnnnnnnnnnnnnnnnnnnnnnnnnnnnnnnnnnnnnnnnnnnnnnnnnnnnnnnnnnnnnnnnnnnnnnnnnnnnnnnnnnnnnnnnnnnnnnnnnnnnnnnnnnnnnnnnnnnnnnnnnnnnnnnnnnnnnnnnnnnnnnnnnnnnnnnnnnnnnnnnnnnnnnnnnnnnnnnnnnnnnnnnnnnnnnnnnnnnnnnnnnnnnnnnnnnnnnnnnnnnnnnnnnnnnnnnnnnnnnnnnnnnnnnnnnnnnnnnnnnnnnnnnnnnnnnnnnnnnnnnnnnnnnnnnnnnnnnnnnnnnnnnnnnnnnnnnnnnnnnnnnnnnnnnnnnnnnnnnnnnnnnnnnnnnnnnnnnnnnnnnnnnnnnnnnnnnnnnnnnnnnnnnnnnnnnnnnnnnnnnnnnnnnnnnnnnnnnnnnnnnnnnnnnnnnnnnnnnnnnnnnnnnnnnnnnnnnnnnnnnnnnnnnnnnnnnnnnnnnnnnnnnnnnnnnnnnnnnnnnnnnnnnnnnnnnnnnnnnnnnnnnnnnnnnnnnnnnnnnnnnnnnnnnnnnnnnnnnnnnnnnnnnnnnnnnnnnnnnnnnnnnnnnnnnnnnnnnnnnnnnnnnnnnnnnnnnnnnnnnnnnnnnnnnnnnnnnnnnnnnnnnnnnnnnnnnnnnnnnnnnnnnnnnnnnnnnnnnnnnnnnnnnnnnnnnnnnnnnnnnnnnnnnnnnnnnnnnnnnnnnnnnnnnnnnnnnnnnnnnnnnnnnnnnnnnnnnnnnnnnnnnnnnnaattaagcctggcgctgagccagcccgaaacgcatgcccggatctggaccacagagatgatgaaacgcacccgcgagttccagcaaaaaatgcatctgcacgtggatggcatccccggcgaagatacgctgatgcagctgatgcgcgtgaccaacagcacgccgggcgtactgattcagaccacccgcaccaccccggacgcgaaaatgcaggagaagaaagcctaatgtcgaccatctgccttgcggcccagcgcagctatacaaccggggaagcggtctggttttcgtaccgtctccccagcctgaaaaacgtattcggcaaaacagcgttatggctggtcgggatttgcgtcatgctggttgtcggcctgtatatgcacgtctactggaacctgcaccacccggcgcctgaaccggtcaacgccagcgttgcgaaaccggaaacgcagctttcggatatgcattacgtgtacgtgagtaaaccgttcccgcatccgcaacctaaagctgcgccagtgccagttgatgttccatcgatgcaggatctgccgatcaacagtgatgatggcgactggcagcaagcgcccgacggcgcagtgccacacgacgcctcgcgggataccttacccgggaccgaagcgcatgagcacgataacgctcccgccagcacgggcagtgaagagtcatcattaacggaattatttaagcaggcgctaaaagagcaggagcaggattattctcaaggaaaaattcccgcgccgccggttgacgaaacgcaggataattcacaagccagtgtaaaaaacagtggaaatagccgttctcctttcagtgaaaaaggagacggcgggagcaggtattaatatttttcaggcagtgcggtaaggttaagcagtcgacctttttccaccacaatatattgaccctttttcagatcggagaggattttaataatagtgctacgtgccaggttagtgtattcctgaatgtaatcataaacgttaatatcacgctgttgttgaacaatcaggtcgttaatctcatataaaaattcgcggacaacggaatacgcactgcgggcaaccagaacatcatcacgtttgctcagcatgcagatgtaccaggaaaggactttggtcagttctggccacagatttttttcggtcatcagctgggcgaagacctctttcttgatcgagcgaacaaccgtattcgtccgaacaaggccgtacatatgggtggcgctgtaatacattgacgacaggccgaaaatgcattgcccggtgacggtgaacatgcacagttcgtcagattcacgtcgaaattcgacttcaccgctgacgataatatgaatatagtcggaatcagaagtggaaattttctgccatttttttaacgttctttcttcaacgcctgaggttgcagaaatgatcttttccatttcatgttgcggacgtaatttttttccatagatgcttaacattgttatacccgatttaagatgtgatttttaaaaagcatggccacggtgttgttaccgagccataaatatttttcctgatgaaaacgtcaagaataaacaaaaaaagagtgaagctttttattaattcgccaaattacttagcgcgctatgtgtccatcttaaatcgggataattttaagtcaattaactaaaaatgaaatgagtttgtacttaggattaatctgatagaaacttgctaaaatatactcattcgggggtaatccgaaggtttacccctgcccgtatttctctaaaagtgcttcagcaatcgccatggtttcaacatctgcaacgccactccataactgcggacggaaatgcatctggaaaaccatgatgatgcgtttttgctgttcgggcgtactgttttctggcacctcgtaaccgtagcgcgccagcaaatcgagcagtgctgcggtatcaacctgctgataatgcggtcgcccgttgatataaaaattcacgcgccccggatcgggccaggctccgataccctgctgcgccagttcgcgccacggaaacagcgggccaggatcgtctttacgctgcggggcgatatccgagtgtgccaccacgttctgcggtttaatgtcgtagcgggcgatgatgtctctggcaagcgggatcagcgccgcaatttgccccggttcgaagggggtaaaggttttcacgtcaccggttttccgccagccgcggttttccagctcaatgccgacggaggtatcatttatgcggttggtgccacgccagaagctgatgcccgcatgccaggccagttcgctctcagggaccagctgccagatacgcggtttgccctgcggagctggcggctttgcggggatgagatagtgagagctgacgtttttatcggtcagggtcgcaagcgaggtgtcgaaatcatcggcggtgtagtgaataaccagcacctttatacgcgggtaggccgcctgcgcctgatggcgcgtatccagctcgtacgcgcctttatcaacaatgccctcttccgaggcgcatcctgccagcaacatcgccagcaggagggttgagagcgaacgcttcatcgacgggttttcaccgccgtgccgcttacgctcaccatcagcatgctggcatcttttccgaccgtttcgtagtcgatatcaatgcccaccaccgcatccgcgcccagcgctttggcctgctcgcccagctccttaaacgcaatctcgcgcgctttacgcagctctttctcgtacgcgccggagcgtccgccgacgatatcccgaatgccggcaaaaaagtcgcggaaaatgttggcgcccagaatcgcctcaccggtgaccacgccgcagtactcggtaatcggttgaccttccagggttggcgttgttgaaaattgcatactttctctccttctttagcgttcaatgcgttagcgacagcattatcggttcgttacgctatgattgaaaggatagttaataaataaggaaatcaacatgcgctactctgctttaacgcttttagtgccatgcgcgctggtgctcagcgcctgcacaacgccggtcacgccagcctttaaggatatcggaacccgcagcggcccttgtattgagggtggcccggatgccgtggcgcaacaattttatgattaccgtattcagcatcgcggtaatgacctgaccgccctgcgcccgtacctgagcgataatctggcgaaactgctcaccgacgcttcgcgcgatccgcagcataacgccctgctgtcatccgatccgttctccagccgcgccacgctcccggacagcgccgacgtcgccagcgcgtccaccataccgaataccgacgcacgcaatattcccctgcgcgtgaagctcacccaggggacgcaaacctggcaggatgaggtgctgatgatccgtgaaggccagtgctgggcaatagacgatgtgcgctacattggcggcagcgttcatgccccggcgggcacccttcgccagtcgattgagaaccgctaacgcatccgttcaataaacgttaaccccgtaaaatgtccggcatttcctgcggaatgccgacatttatactcgccccccattcccgtcgctattttgtgctatgtttaagagtaaatacgggttatatttaacttttaacgcagaaatattgcataactattctgtcaacggtactatctgcggcctcaattgctatagattgcctggatgagtaaagactgccccgatgagtattaaactaaacggcattaactgcttctacggcgcacaccaggcgctgttcgacattacgctgagttgcccggagggcgaaacgctggttttgctcggcccaagcggcgcgggaaaaagctctcttctgcgtgtccttaatctgcttgaaatgccccgttcaggtacgctggcgatcgccggtaaccatttcgatttcgccaaaacgccttctgataaagcgatccgcgaactgcgtcaaaacgtcggcatggtattccagcaatacaatctttggcctcaccttacggtggtgcagaaccttattgaagcgccgtgccgcgtgcttggcttaagcaaagaccaggcgatggcgcgtgccgaaaagctgctggagcgtctgcgccttaagccgtacagcgatcgttatccgctgcacctttccggcnnnnnnnnnnnnnnnnnnnnnnnnnnnnnnnnnnnnnnnnnnnnnnnnnnnnnnnnnnnnnnnnnnnnnnnnnnnnnnnnnnnnnnnnnnnnnnnnnnnnnnnnnnnnnnnnnnnnnnnnnnnnnnnnnnnnnnnnnnnnnnnnnnnnnnnnnnnnnnnnnnnnnnnnnnnnnnnnnnnnnnnnnnnnnnnnnnnnnnnnnnnnnnnnnnnnnnnnnnnnnnnnnnnnnnnnnnnnnnnnnnnnnnnnnnnnnnnnnnnnnnnnnnnnnnnnnnnnnnnnnnnnnnnnnnnnnnnnnnnnnnnnnnnnnnnnnnnnnnnnnnnnnnnnnnnnnnnnnnnnnnnnnnnnnnnnnnnnnnnnnnnnnnnnnnnnnnnnnnnnnnnnnnnnnnnnnnnnnnnnnnnnnnnnnnnnnnnnnnnnnnnnnnnnnnnnnnnnnnnnnnnnnnnnnnnnnnnnnnnnnnnnnnnnnnnnnnnnnnnnnnnnnnnnnnnnnnaatgaaaaaagtattgattgccgcgctgctcgctagcgtcagcctttccgctaccgcagctcagaccattcgtttcgccactgaagcgtcttatcctccgtttgaatccattgatgccaacaataagattgtcggctttgatgtggacctggctaacgccctgtgtaaagagattgatgcgacctgtaccttcagcaaccaggccttcgacagcctgatcccaagcctgaagttccgtcgtatcgacgccgtaatggcgggcatggacatcacccctgagcgtgaaaaacaggttctgttcaccaccccttactatgacaactctgcgctgttcatcggtcagaaagggaaatacgcctctgttgatctgctgaaaggcaagaaagtgggcgtgcagaacggcacgacgcaccagaaattcatcatggataagcatccggaaatcaccaccgtgccgtatgacagctaccagaatgcgaagctggacctgcaaaacggtcgtatcgatgcggtgttcggggacacggctgttgtgactgaatggctgaaagcgaacgacaagctggccgccgtgggtgacaaggtgaccgataaagactacttcggtacaggtctgggtattgccgtacgtcagggcaataccgagttgcagcagaaattcaacgctgcgctggaaaaagtgaagaaagacggcacctacgaaaccatctacaaaaaatggttccagaagtaattcctgatgaatgaaatttttcctttagcaagcgccgccgggatgaccgtcggccttgccgtttgtgcactgattatcggcctcgtactggcgatgttctttgcggtgtgggagtccgttaagtggcgccctgtcgcatggctcggttcagcgctggtgactgtgctgcgtggactgccggaaattctggtggtcctgtttatctatttcggctcctcacagctgctgttaacgctgtcggacggcttcacgattaatctcggctttgcgcagatcccggtgcagatgcagattgagaacttcgacgtcagcccgttcctgtgcggcgtgattgcgctctccctgctctattcggcctatgcgtcacaaacgctgcgcggcgcgctgaaagcggtaccgcagggtcaatgggaatccggccaggcgctgggtctgtcgaaagcggcgatcttcttccgcctggtgatgccgcagatgtggcgtcatgccctgccagggctgggtaaccagtggctggtactgctgaaagataccgcgctggtgagcctgatcagcgtgaacgatttgatgttgcaaaccaaaagtatcgccacccgtacgcaggagccgtttacctggtacatcgtcgcggcggctatctacctggtgatcacgttgctgagccagtacgttctgaagcgtattgatctgcgcgcaacgcgttttgaacggagaccaggctgatgctggattatttacccgaactgatgaaagggctgcacaccagcctgacgctgaccgtcgcgtctatcatcgtggcgctgatcctggcgctgatcttcaccatcgtcctgacgctgaaaacgccggtgctggtgtggattgtacgtggctacattacgctctttaccggaacgccgctgctggtgcagatcttcctgatttactacggcccgggccagttcccgtcgttacaggaatatccggttatctggcatctgctctctgagccatggctctgcgccctgattgccctctccctgaacagcgcggcctataccacgcagctgttctacggtgccattcgcgcgatcccggaaggccagtggcagtcctgcggggcgctgggcatgagcaagaaggatacgctggcgatcctgctgccttatgcctttaagcgcgccctctcttcctattccaacgaagtcgtgctggtgttcaaaagtacctctctggcctacaccatcaccctgatggaagtgatgggccacggacagctgctgtacggacgcacctacgacgtgatggtgttcggtgcggcgggtctggtctatctggtggtcaacggtctgctgaccctgatgatgcgtcttatcgagcgtaaggcgctggcgtttgagcgcagaaattaatcgacttaatgcataaagctgttttcgtagtgcgggtaacctgatgggttacccgcatttttttatgcattaaataatatttaatcatatttattgcatataaattcattgagtggcattgtacatccatgccgcagacacggcgcataatgacaagattgacagacgggagcattacaatgaaaaagttagttctggccgcattactcgcaaccttcgccgctggcgcatccgccgccgataaaatcaatttcggcgtttctgccacctatccgccgtttgaatcgctggatgccagcaaccagatcgtcggcttcgacatcgacctggcgaaagcgctgtgcaagcagatgcaggccgactgcacctttactaaccacgcatttgacagcctgatcccgtccctgaaatttaaaaagtacgacgcggtgatctccggcatggacatcacgccagagcgcagcaagcaggtcgcgttcaccgacccgtactacgcgaactctgcggtggtgattgcgaagaaaggggcttataaatctttcgacgagctgaaaggcaaacgcatcggcatggagaacggcaccacgcaccagaaatacctccaggacaagcatcctgaagtgaaaaccgtggcctacgacagctaccagaacgccattatcgacctgaaaaatggccgtattgatggcgtatttggcgacaccgcggtcgtgaatgagtggctgaaaaccaacccgcagctgggtacagcgacggagaaagtgaccgatccgcagtatttcggcactggcctcggtattgccgtgcgtccggataacaaggctctgcttgagaaactgaacggcgcgctgaaagcgatcaaagctgacggcacataccagaaaatcagcgagcagtggttcccgcaataaccttttttgccgggtgacctggcctacgggggtggtctgtaggccgggtaaggcgaagccgccacccggcaatttcttaaagcggcacaaagaacctgaaccgtgccccgctcacggactccatcagcctgatccccccgccgtgcagctccagcattcttttcacgattaacaaccctaacccgccccggtgctcccgcgaggcctgtggatttaacgctgacggacgctggaacagatcgtcccgtaatgcggcatcaacacccgttccgctgtcggccacttcaacctgtaaccggtcgttctcctgccacaccgccagacgaatgtctccacctgctggggtatggcgtatcgcattatccagcagattcgtcaccacccgttcaatcatggaaacatcggccaacacctgcggcagcggacccgggacgtcaatgtgcagatttaactcacgcgtgcgggcagcgagttcaaacttttgcgccacgtcggaaatcagttcagccatggcaaaacgctcgcgctggggcttgatgccgccgtgctcaagacgcgccagctcgaacagctgctgcgacagatggcgtaccttttgcccctgacgcagcgcggtagcgaggtactgctgatgctcctgcggcgacagcgttgcggatttcagcgacagcgtttccagataacccagcagcgacgtcagcggggtgcgtaagtcgtgcgaaatgttggcgataaactcccggcgctggcggtcgctgtcggccagccgatcccactgagaggtgattttgcgcgccagctcgataaaggtattgcgcaggatcgccacttcatcctggccggcaggctcaagcggctgggccgccagctgcttaatcgcgctgatgctgtcctgctccagcccggccacgtccagcgtgagctctttaaccgggcgcgtcacccagtaccagagcagcaaccccgccagcagaccaaacagcgccaccagcagcatcgaccacagcgccgtactccagagcgctttgtgccaggccatctccgccagcgcgttggactcctccccctgcaaaataatgtacagataccccttcagctcaccgtcctgccgcagcggggtggcgctgaagactttcttattctggcttcggggatcgtcgccaaacaccggcatcaccgtcccgctgaggaaattctgtatcggcacgaggtcaattttttgccgctgaatgtgccccggcggggcggcatcggccaggatatcgccatctggcgagacaacatacagctcgacgctcggattaaaggtcatcagccggtcgaacagcggttttaaggcgctgcgatccaccctgccctgcgcatccagaatcgcttcccgctgcacaatctgctgcgccagcccaccggagagccgctgcaccatcgcattgccgtactgcatgctactgtagagctgcaccgcacaggcgacggtggcgcagagcagcagtaacgccgtaaacagcagcgtcaggcgctggctcaggctaaagcgacgcatcatgattctgctccgcaaatttgtagcctttgccccagacggtgcgaacgatctccggctcggcggcatctttctctattttaatgcgcaggcggttaatgtgggtattgacggtgtgttcgtagccttcgtgctgatacccccatacctgctccagcagtgccagccgcgaaaagacctctccgggatggcgggcaaagaaatagagcagttcaaattcgcgcggggtgagatcgacgtgttgaccgttaaggcgcacggtgcgcgccagcggatcgatagtcagtccgtgcgcctgaataatgccgtccgtctgcgcctggcccatcgcctgctgacggcgaaacagcgccttaatgcgggcaatcagctcctgcaccgagaaaggttttgccagataatcatccgccccggtttccaggccggtaatacggtcagtttcactgctgcgggcgctaatgatgataatgggcaggtagcgggtcatctggcggatacggcggcaaatctccagaccatcgacattcggcagcatcagatcgaggatcaccgcgtcccacggctgtgtttcaagacgctgtaaggcgttgcccccgtcgggctcgtgggtaatggcgtagccttcatcttccagattaagacgcaggagtgccgcgatatcgtggtcgtcttctaccagcaggatctgcttcatgggtaagccttcaatcatttgttatgacgtaagcttacctgatttcgagcgggggaagagttcacattttgttgaacattgtgcggggtttatgccgggtggcggcttcgccttacccggcctgcgctttggttaacaacgtgagctgacaggctattttgccgaccagttgaaagcgccacgctggcttaaaacagagacgggagtcgcattactgggttgagcaaacaaagccgggtggcggctacgccttacccggcctactccggatcgtaggcccggtaagcgcagcgccaccgggcgatgttgaggattagcgcgttttcaccaacaacgtcaacacttcataatgggcggtatgggggaacatatcgaaaagctgaacgcgcgcaatgcggtagcccggcaggctggcgatatccttcgccatggtctgcgcgttacagctggagtagacaatgtactccggcgccatctggctcaggtagtcgcagagcgcctggccgataccccggcgcggcgggttcaccagcaccagctccggcacgttgccctgtccggtggcgaaccgggtcgagtccagcgcctggaagtgcagattcgtcagccccagctctgcggcggactgcttcgcgcaggcaatcgcttcggcggagatctcaattccggtgagctgcatgtctggcgtggcacagtgcagaccaaagccgccgacgccgcagaacagatcccacatgtgatgaacctgtaacgcacgcacccagtcgcgcgcggtggcatacagcgcgctggcgacggtggggttagtctgaaagaagctttgcggacggatccacagcggcacgccgttaaagctctccgccagggcatactgttcggtgaagaaaatctctttctccccttccatgatcgccatatgcaccggctgaatatttgcggtgataaccttgagctgcggaagctgttcctgcaaccccggaagcgccgcgcgcagctgctccagcttgttttccgaacgcagcacaaagcgcagcatcatcccgccgtcgatctggctttcggtcagcaaaaggtatttcagctcgccgcgcctgcgggcaacgttatagggcgttaaccccgcccgggcgataaacggtttcagcgcgctaaacaccggctcaaacgaggcgggatatagcgggcagtcggttaaatcttccggggtgccgtcgcggtgcagcactccccagcagcggcttttcaacgctgccgctgaccacctattttggctttattgcgaaagccctgttccgggccaatgacgggtgcgcaccactcgcccaccgcatgtgctgtcagcagctgttgcaggtcggccattttggcggtgagttgttgagagaccggctgttctatccactgacaggagcggcagcgtccggcgtcatagagtgcgcactgcatatgaaaaccttaagaaacacgagggctgcgattatacacattattgcaggcggaagaaccgccgactggaagccgggagataaagcaggcagagcaccagcatatccggcagtttttgcatcaccagtgaatggaaaatctcgcgtcgcgactcaccgggtatgctgaacagctccggatagccatagcccagcgaggcggcccacaggtagcctgcggcggtgatctgcgtaagcagatacacccagcgcgcccagttacgtcctttcaccaacgagaacgcacagtagatctcaataaacaccagcatcaggctgctgagaaacaccagcgtcagattccacgtctgcgcgctgcggtgaataaattcccccattccgcgcggacccagcgtgttcattatcatcagcacatccaggcagcggatcataataatggcgagcgccgccacctgcaccagtgcagggacgttcggacgagcgtgcgaatgacgtgttttttgtaagaatcccaatgtttttacttccctgaaaaacagtgccgcgtcatacgcggcacatcactggaaatagtaattccttcagccgcgtcttgcacgctggatatcgcgcacacgctgtttttccgcgcgcgccatcaaataccaggcgataaatccgacaattccgaccacgccaaggatgatggacgccagggcgttgatctccggattcacccccatccgcacgctggagaagaccagcatcggcagcgtcgtcgcgcccggtcccgacacaaagctggcgataaccagatcgtcgagcgagagcgtgaacgccagcagccagccggagatcaccgccggcataatcatcggcagcgtgatgatgaaaaagaccttcagcggcgttgcgccgagatccattgccgcctcttcaatggagcgatccagctcgcgcagccgcgaggagatgaccaccgccacatacgccgtacagaaggtgacatgcgccagccagatggtgagcatcccgcgatccgctggccagccgatggcgtgcgccagcgcgacaaacagcagcagcagcgacaggccggtgatgacgtccggcatgaccagcggggcggtgatcataaacgcgaaaccattcgccccgcggaaacggccaaagcgcaccatcaccagcgcggcgatcgtgcccagcacgcaggccatcgtcgccgccagcgccgcaatagtcaggctcagccccaccgcgctcatcatcgcatcatcgtggaacagctcgctgtaccagcgcgtcgaccagcccgcccagacggtgaccagcttagagctgttgaacgagtagatcaccagcatcagcatcggcgcatacaggaaggtaaagccgataatcagaatcgcaattcgccacggggagcgtactaccggtaagttgttcatccgtggtctcccatctgtttctgctgatgtttgtggaaccacatgatcggcacgatcagcagcagtaacatgacgatcgccaccgccgaggccaccggccagtcgcggttattgaagaactcctgccacagcacgcggccaatcatgatgctgtccgggccgccgagcagctccgggatcacaaactccccgaccgccgggataaacaccagcatcgatccggcgatgatcccgcctttggtgagcggcacaatgacgctgaagaaagtcttcaacgggcgtgcgccgagatccagcgaggcttccaccagcgagtaatcgattcgcgtcagcgccgtatagattagcagcaccataaacggcagataggcatagacaatcccgatatacaccgcaaggttggtgtgcaggatcgtcagcggctggtcgatgaccccaagccacagcaggaagttattcagtatgccgttattcttcaggatccccatccacgcgtacacgcggatcaggaacgacgtccacgacggtaaaatgaccaacagcagtaaaatatttcgcgtcgacggcttgctgtgcgccactgcccacgccagcgggtagcccatcaacaagcagcaaatcgtagaaatagccgcaacctgtaacgactgcaaataggcttcgaaatagagcggatcgtcggtcagttgcaggaaattaccgaggtttaaggtcagcgtcagctgcccgtcggcccactcccacagatcggtatacggtgggatcgcccgcgccatctccgccaggctgatcttaaagacgatcaggaacggcagcagaaacagcaggatcagccagatatagggcatggcgatgaccagcttgcggccatgcgccatctgcatgcgcgccagccagagcgcgaaaccgcccggttttttgacgcgggctggaggttcaagtgtgctcatgaccgctccttataccgtcaggactacgcaactgtccgcatcccagcagaggctcacttcgtcgccccaggttggctgtcccttgcgataccggtgttcgttctgtaactgggcgctgagcatctggccgcttttcaggcgcacatggtaaatcgacagatcgccgagataggcaatgtgcaccacttcgcccacggcaaagttatagccatcggcgggcggctcatcgcaaagcatgattttttccgggcgcagggcaacgtaaaccggcacgttgtccaccacggagttatcagaatcaaccttcagcgggtgcaccagccccggcgattcaatcaccagaccgtcttcctggcgttccttcagtagcccttcgaagacgtttaccgagccgatgaactccgcgctgtagcgggttgtcgggtgttcatagatctcttccggctcgccgatctgcacgaacttaccgcgattcatgatcgcaatgcgcccggccatggtcatcgcctcttcctggtcatgagtcaccatcacgcaggtcacccccacgcgctcgaggatatccaccacttccagctgcatccggtcgcgcagctttttatccagcgcgcccatcggctcgtcgagcagtaataattttggtcgcttcgccagacttcttgccagcgccacgcgctgacgctggccgccggaaagctgatgcggcttacgcttcgcaaactcctgcatatgcaccaggctcagcatctctgccacgcgcgcggtgatttcggctttcggcagtttgtcctgcttcaggccgaaggcgatgttctgctcaacggtcatgtgcgggaacagggcataggactggaacatcatgtttatgggccgctggtacggcggcacgctggagaggtctaccccatccagcacgatctgcccggcggtaggctgttcaaagcctgccagcatacgcagcagtgtggatttgccgcagcccgatgcgccgagcaaagcaaaaatttcacctttgtagatcgtcaggctgacatcgtccacggcatgctggccgtcgaaggatttgatgaggttacgaatttcaagaagcggggtcagcgctttacggactttcgcctgcgggcgggggatcgcgtcattcacggggtgttctccggcatagatcaacactggtgcaaacgcaccgtcagggtgcgcatcgccgggcggcgctaacgcttgcccggcctacgggatctgtcggcccggtaagcgacagcgccaccgggcaacgatatcaaacgccgttacttaccgcttttcaccttggtccacgcgcgggtacgcacacggtcaattttcggttcctgcactttcagggtgaagagcttggcaaacacatcggctggcggatagatcgccggattattgcggatttcttcgctcaccagcggcacggaggccttgttaccgttggcgtagtagacatggtcgctgatgtgggcaatcacctccggacgcatcaggtagttgaggaattgatacgcttcctctttatttttcgcatcagccggcatcgcgaagacgtcaaagaaggccagcgctccctccttcggaatgaagtaggaaacatttacgccgtttttggcctctttcgcgcggttcgccgcctgccagacatcgcccgcccagccgatggccacgcagatatccccgttagccaggtcgttgatgtactgagaggagtggaagtagcgaatattcggacgcagcttcaggagcaggtcggtcgccggaccggtgtagtcgtcggccttgctgctgttaggatctttgccgagatagttaagcacggtggcgaaaatctcttccggcgcatcgaggaaagagacgccgcagcttttcagcttctcgaggttttccggcttcagcaccacgtcccagctgtccagcttgacgtccgggcccagcgccgctttgactttatccacgttatagccaataccggtggtcgcccacaggtaaggcatcgcgtatttattctccggatcgtgcttcgccaccagcttcagcacgtccggatcgaggttcttccagttcggtaatttgctcttgtccagcggctggaagacaccggcggtcagctgacgctccaggaagcttgccgacggcaccaccagatcgaaaccggtgctgcccgccatcagtttgccttccagcacttcgttggaatcgaatacgtcgtagacaaccttaatgccggtctctttttcaaaattcgcgacggtgtccggcgcaatatagtcagaccagttatagacgtgcagcgttttttgttccgcagcgagcgtgccggcagagacggccatcagagcacccgcaaccagacccgataaccattttttattcaaggcgatcatattgttattccttctgaaagttcgttaacaaacgaaccaaaactgtgcagcctgaagatatgcaataatcatgcatagtttgtcgctctgcccgaaataaaataccccctcttcccggcaggttccgctcgcttttttaagcaccgcaagaataactgtagcccgtgtctccggctatagcccagacgaaaaaacgccttttatcaattttttatgcagattatgtctacgtgataagccgaaacggccggagaggaggtgaaaaactctttaaagaaaggttaaaagcagcagaaaaaatggtgttatgcagccgctctggcagcgactgcgcaaaagtcagacaggcttagtggagaaaattgggagatgcatcattattctcggcatcatcttccgcgctatacagcaggtgatgtgcgttggcttccatcattaccatggaaatttgctcttcgctcaggcgcataaaccaggcgaactgcttgaaggagagccccgcgccggagaataaagactggcaaaccaccagctttggcagattatcatcctgtatgtcgagaaacgctttcaccgtcaaagaactggcgttgatcgctgacagatcagacgccagcgccagcagcgcagaaggctttacttcagccagcgccgagaacaggatcacgtcgttaatcagatcgattttggcatcgaaaatgccatcgaaattttgcatgtgaggcagatgcagcgcctggcaggagtcgcattcgaagaaagtaataccggcatcatcgagccattgacgtaacgtatccagtgtaggtacgacctgtaaatccatcgctgtgcagcctcttaaataaaaacgttgtccagattacgcaaaaagtgcgcgccgatccatttaaccgcccgttttcaggcaaaatcccggcgtcgcatggcgttcaatccatgcgatcattttacctgcaatatcgacgcctgtggttttttccaccccttccagccccggcgaggcgttgacttccatcaccagcggcccgcgcccggcacgcagcagatcgacccccgccacgtccaggcccagcgtctgcgctgctttcaccgcaatctcgcgctcgcgctcgctaataagggccacccgcgcgataccgccgcggtgcaggttagagcggaagtcgccctcttttgcctgccgctctatggcggccaccacctcatcgcccaccacaaagcagcggatgtcgcacccgttggcctctttaatatactcctgcaccagaatatgggcattcagaccgcgaaacgcgtcgatcacgctttccgccgcctgacgcgtctccgccagtaccaccccaataccctgcgtaccttccaccagcttaataaccagcggcgcaccgcccaccatgtcgattaaatcgctggtgtcgtccggggagtgggcaatcccggtgacgggcagatcgatcccctggcgcgccagcagttgcagcgagcgcagcttatcgcgggcgcgggagatcgccacggactcgttgagcggatagcttcccagcatttcaaactggcgcagcgcagccgtaccgtaataggtgatctgggagccaatgcggggaattaccgcatcaaaatgcgggagtttgcggcctttgtaatgaatcgacgatgccgcagggtcgatgttcatatagcaggacatcggatcgaggatctcaacctgatgtccgcgtttcgccgccgcttctcgcaggcgtttacatgaatagagcgttccatcccgggacaatatggcaattttcaccctgcacctctctaaagacatggtaaaagcctgcctatcatacacgaggcgcaggaggaatggactaccgcgttgcccagccctgtttgtgcaggtaatcgagaatgaacgggcggttctccttaatgatggtgcgacgaatatggtcgctccaggtgtcgcggcggttgttgctgtcgcgcgtcagatagtagttcgccagctcttcatcgtattgatgcagaacgtcctggtcgaccggctggtagtggttttcatgcaccagcatcgcagcaggaatgcgcggcttcagatccgggttatctgccggccagccgaggcacagaccaaacagcggcagcacgtgtttcggcagcttcagcagttccgtcacgctttcgatgttgttacgcagcccgccaatatagacgccgccaagccccagcgattccgccgccgtgaacgcgttttgcgccatcagcgccgtatccaccacgcccagcagcagctgttccgccagccccagctcggcctcggggcagatttgcagatgacggttaaaatcggcgcagaacacccagaactcagccgcctgggcaacgtgcttttgtccgcccgtcagcgttaccagctgctcacgcatcgccggatcggtgatgcggataatggagctgcactgcaaaaagctggagctggaggtgcctcttgcgctgtcgatgatcgcttcccgctgcgcctgggtaatcggctcatcggtgaaatggcgaatggaacggtgggaacgaagcaggtcaatggttggcgtcattttgtctctctttgtgttgcgtaaaacgtatggcagccagtataggcaatgatccacctgatgtaattggcgaaacatagcctgactgtatcaaagtgacaggtgaaaccttctttccatgacggcaggttatcgtgcactataggcgctattcgccgtcaggcttgttttttgaggagagagaaatgtttgcagtaatttttggtcgtccaggatgcccttactgtgtacgcgcgaaagagctggcagagaaactgactgaagaacgtgatgatttcaacttccgttacgtggatatccacgcggaaggcatcactaaagccgatctggaaaaaaccgtgggtaagccggttgaaaccgtgccgcagatcttcctcgatcagaaacacatcggcggctgtaccgattttgaggcctacgccaaagaacacctgggcctgtttgcggctcagtaatgcgaagacgccctcaccctgagggcgtttttatttacggtgcttccgctgttgcagcaggctgcgcgtaaataagaaacagagcgcgcccagcgcacaccagaaaacgccactcagtagccacgccacttcctgccagacgcttctcgacgagagaaacagcacgcgcatcagaagcaggcagagcggggccgcaagcattgccccaataagcggcatcaccacctcgcctttacgcgagagaaaaccagcgactacccccggcaggatgaagaacaacaggcccagctcgggatgaccggacgctctgaaggcgcctttcacgttaaaagcgagcgacatgcaaacgaccgtaaacagcaaaaaacagctgattacgccagcccagtttcgtttaaagttcaaactatcctcctgacttatctctatcaaatacaaaaatcgtccggtggacgcccagtcagataaagcaatgcggcaatccttgccaaagcacgcacagaagtcgtgcgataataggtggctgtcggtagctattacgattaaactaaccgactgctagtgtttagggtatttatcaggaagcagggagatgcaaagtgattccctgactctgaaaacagtagcccaaatagtcctttcattcaacaacttactggtaaacaagaagttagcctccgtgaatataaacgtcgcagacttgttaaatgggaattacatcctgttattatttgtggtactggcgctgggcctttgtctgggtaaattacgcctgggttcagttcaacttggtaattccattggcgttttagtcgtctccctgttattaggtcaacaacatttcagtattaacacggacgcgcttaacttaggtttcatgctgtttattttttgcgtaggcgtggaagccggtccgaactttttttccattttcttccgagacggcaaaaattacctgatgctggcgctggtgatggtcggcagcgccctgctgattgcgttagggctgggcaaactgtttggctgggacatcggcttaacggccggtatgctggcaggctcgatgacctccacgccggtgcttgttggcgcgggggatacgcttcgtcattctggcatggcaggcacgcagctttcctccgcgctggacaacctgagtctgggctatgccctgacctatctgattggtctggtgagcctgattgttggcgcgcgctatctgccaaaacttcagcatcaggatctccagaccagcgcccagaccatcgcccgcgagcgcggcctggacacggactccaaacgtaaagtttacctgccggtgatccgcgcctaccgcgtcgggccggagctggttgcctggaccgacgggaaaaacctgcgcgagctggggatctaccgtcagaccggctgctacatcgaacgtatccgtcgtaacggcattctggcaaacccggacggtgnnnnnnnnnnnnnnnnnnnnnnnnnnnnnnnnnnnnnnnnnnnnnnnnnnnnnnnnnnnnnnnnnnnnnnnnnnnnnnnnnnnnnnnnnnnnnnnnnnnnnnnnnnnnnnnnnnnnnnnnnnnnnnnnnnnnnnnnnnnnnnnnnnnnnnnnnnnnnnnnnnnnnnnnnnnnnnnnnnnnnnnnnnnnnnnnnnnnnnnnnnnnnnnnnnnnnnnnnnnnnnnnnnnnnnnnnnnnnnnnnnnnnnnnnnnnnnnnnnnnnnnnnnnnnnnnnnnnnnnnnnnnnnnnnnnnnnnnnnnnnnnnnnnnnnnnnnnnnnnnnnnnnnnnnnnnnnnnnnnnnnnnnnnnnnnnnnnnnnnnnnnnnnnnnnnnnnnnnnnnnnnnnnnnnnnnnnnnnntggctacccggacgcccacgcgcgtctcgatccgagcttccgcaacgggaaagaggtgtttgaccgcgacctgctggacatgcgtatcgtcaccgaagagattgtggtgaaaaaccacaacgccgtgggccgccgtctggcacagctgaagctgaccgaccacggttgtttcctcaaccgcgtgatccgcagccagattgaaatgcctatcgacgataacgtggtgctcaataaaggcgatgtgttgcaggtcagcggcgatgcccgacgggttaaaaccgttgccgaccgtatcggctttatctcgatccacagccaggtgacggacctgttagccttctgcgccttcttcattgtcggcctgatgatcgggatgataaccttccagttcagcaactttagcttcggcattggtaacgcagccggtctgctgttcgccgggatcatgctgggcttcctgcgagcgaaccatcccaccttcggctatatccctcagggggcgctgaatatggtgaaagagttcggtctgatggtctttatggcgggtgtcggcttaagcgccgggagcggcattggcaacggcctgggcgcggtcggctggcaaatgttggtttccggacttatcgtcagcctggtaccggtggtgatctgtttcctgttcggcgcctacgtgctgcgcatgaaccgcgccctgctcttcggcgcgatgatgggcgcgcgcacctgcgcaccggcgatggagatcatcagcgacactgcgcgcagcaatatcccggcgctgggctatgcaggcacgtacgcaatcgccaacgtgctgctgacgctggcaggtacgctgatcatcattatctggcctggactcggataaatctcaagtttgcgtgtggcgcaaaaaactttcgttacgcgcagaactttttacgcagggtgcagtcataactagtgccactgcttttctttgatgtccccaatttgtggagcccatcaaccccgccgttttggttcaaggttgatgggttttttgttgcctgaaacttgctcattttgccattttcgctttctcctcgctctgcaaacatatatgatttaacacatatgaatgtacgcaggatcatccgatgcttcaccccgttcagctcttcaaaaccctctccgacgaaacgcgcctctccatcgtcatgcttttgcgtgaagcgggcgagctgtgcgtctgcgatctctgctccgctaccaacgagccgcagccgaaagtctcccgccacatggccttactgcgcgaggccgggctggccatcgaccgtcgcgagggtaagtggatctactaccgtctctctcccaacatgcctgcatgggcggcaaccgttatcgacaccagctggaactgcctgcgggaagagacgcgtatgaagctgaaaaaccgacttccgggctcgtgctgaccaaaacatattcacaataacagatttaatggagtaaaagatgtttctggcaggagcgatttttttattcacactggtgctggtcatctggcaacccagagggctcagcatcggctggagcgcgaccattggcgccgcgctggcgctgatgagcggcgttatccacattaacgatatccctgtggtgtggaatatcgtctggaatgcgacggcaacgtttatcgcggttatcgttatcagcctgctgctggatgagtccggctttttcgagtgggccgcgctgcacgttgcccgctggggaaacggtcgcgggcgattgctgtttacctggatcgtgctgctgggcgcagccgtggcggcgctgtttgccaatgacggcgcggcgctgatcctcacccctatcgtcatcgctatgctgctggcgctggggttcagcaagcaggctacgctggcgttcgtgatggcggcgggatttatcgccgataccgccagcctgccgctgattgtctccaacctggtcaacattgtgtcggcggacttctttaagctgggcttcagcgaatacgcctcggtgatgatcccggttgatatcgctgcgattgccgcaacgctggtgatgctgcatctgttcttccgaaaagaaattccccacgaatatgaccaggcaaaactccgcgagcccgcacgggccattcacgacctgccaacgttcagaacgggctggatcgtgctgctgctactgcttgtcggtttctttgtgcttgaacctctgggtatcccggtcagcgctatcgcaacaactggcgcgctgattttgtttgccgttgctaaacgcgggcacgccattaacactggaaaagtgctgcgcggcgcgccgtggcaaattgttatcttctcgctggggatgtatctggtggtgtatggcctgcgcaacgccgggctgacggagtctctttcaggcgttcttgatcacttagccggatacggactctggatcaccacgctgggaaccggatttatcaccgccttcctgtcatccataatgaacaatatgccaacggtgctgattggcgcgctctccattgagggtagtgctgcaacagggttggttaaagaggcaatgatttacgctaacgtgattggctgcgatttggggccgaaaattacccccataggaagtctggctaccctgctctggctccatgtgctggcacagaaaaacatgactgttacctggggctactacttcaggacgggcatcataatgaccctgccggttctctttgtgacgctcgccgcactcgcgctacgtctctccttcacaccataatgagtcactgatatgagctacatcaccatttatcacaaccccgcctgcggcacgtcgcgcaatacgctggagatgatccgcaacagcggtacggaaccagagattgtcctctatctggaaaacccgccgtcacgcgatcaactgaccaggctgattgcagacatggggatttccgtgtgcgatctgctgcgcaaaaacgtcgagccttatgagcaactgggccttgccgggggaaatttcaccgatgaccagcttatcgatttcatgctgcaataccccatcctgattaaccgtccgattgtggtgacaccgctgggcacccgtctgtgccgtccttctgaagtcgttctcgacatccttccggacgcgcaaaaaggggcatttacaaaggaagatggcgaagtcgtcgttgacgccagcgggaaaaaaatctcccgacaataagcgtagccggggcgagtgctatcagacggtatcctcgcctgcaattcgccccaccatcacccggatctcctcccgggttaacggcgaccgatcggtcacaaaatgcagcgtcatcccctcgataaacgcatccagcgcgcgggcggtggccggatcaaaccactgctccagcgtagcctggctcatcttcatccagtcctgcatcaccgttttcagcgcggcgctgcggtgcataaacgcgtataactgatacatcagcgccatattgtgtggcgtggtcacggctgaactgtggatcagcgtggtaatggcctcgcacgccctctcgcgccccgtaacccccgcgaagaaatcccggtactgctgagacatctgctgcgtaaaccacgtgaatgcctcctccagaagcgactccatcccgtcgaaatagtaggtcatcgaccccagcggcacgcctgcgcaggtggcaattttgcggtgcgtgacggcatgaataccgtgctcagcaatggtgtccagcgtcgcctggagtatcttctcgcggcggttagggtcgttcggtggtctgctcataaaatcctcatccggtttatgtacaaatgtacacaaagttgctagtgttgtcgctattgttgtacttctggtgctgatcccaatgacgctaacttctcctcgcaaagccctgcatctgcgcatgtgggcgctgtttatgttcttcttcatccccgggctgctgatggcttcctgggcaacgcgcaccccggcaatccgcgatacgctatccgtttcgacggcggagatggggatcgtgctgtttggcctgtcgattggctcgatgagcggcatcctctgctcggcctggctggtgaagcgctttggcacgcgcgcggtgatccgcaccaccatgtgctgcgcagtggtaggtatgctcggtctgagcgtggcgctgtggttcgcctcgccgctgatgtttgcccttggcctgatggtatttggcggcagctttggtgcggcggaagtggccattaacgtggagggggcctccgttgaacaggcgatgaacaaaacggtgctgccgatgatgcatggcttttacagcctcggcacgctggctggtgcgggcgtggggatggcgctgacggcgctgggcattgcggccaatgtgcacattttactcgcggcgctggtctgtattatcccgatcctcaccggcatcagggctattcccgctggcacaggacaaaatacctcggacgaacagaagtctgcggcaaaagggttgcccttctatcgcgatttccagctgatgctgattggcgtggtggtactggcgatggcgtttgctgaaggctccgccaacgactggctaccgttgctgatggtagacgggcacggatttagccccacctccggctcgctgatttacgccgggtttacgctcggcatgaccgtcggacgctttaccgggggctggtttatcgaccgttacagccgcgtggctgtcgtccgtgccagcgccctgctgggtgggctgggcatcgcgatgattatctttgtggatgtggactggattgccggcgtgtcggtgatcctgtggggactgggcgcctcccttggcttcccgctgaccatttccgctgccagcgataccggccccgacgcgccgacacgcgtgagcgtcgtggcgaccacgggctacctcgctttcctggtgggcccgccgctgcttggattcctcggtgagcactacgggttacgcagcgcgatgctggtggtattagggttagtcattattgccgccctggtggcgcgagcggtggcaaaaccggaagcagaaacaacgtcaatggagaagggatatgagcgttaaactgattgcagtcgacatggatggctccttcctgagcgatgcgaaaacctataatcgcgcgcgttttctggcgcagtacgcgcgcatgaaagcgcaaggcatccgttttgtggtcgccagcggaaaccagtactaccagctgatctcatttttcccggagatcgcccatgaaattgccttcgtcgccgaaaacggcggctgggtggtggatgcgggcgaagacgtgtttaacggcgaactgtcgaaagagcattttctgaccgtcgccaccctgttaaacgacgtgcccggcattgagataattgcctgcggaaaaaacagcgcctacacgctgaaaacgtataacgacctcttcaaagagattgctgcgaaatactatcaccgccttgaaagcgtcagcagctttgacaacctcaacgatattttcttcaaattcgggctaaacgtctctgacgacgaaattccgcgcattcaggcgctgctgcatgagaagcttggcgacatcatggtgccggtgaccacgggacacggcagtatcgacctgattatccccggcgtacacaaagctaacggcctgcggatcctgcaagcgcgctggggcattgaggacagtgaagtggtggcctttggcgacagcggtaacgacgtggagatgttgcgccaggctgggtttggcttcgcgatggccaatgccagaccgcacattaaggcggtggcccgctatgaagcaccgaacaataatgacgaaggggtgctggacgtaattgatagggtgctggatgggagggcgccgtttaattgattccgtgcgctctggtgccctcaccctaaccctctcccacagggagaggggactgtcccgagctcgcccacgggggagagggaataagaattacggttgcagggcgtttccgacgcgtttgtctttcaggaacaccaccatcagccctacccacagcacaccgtttgcgagattgaacaggctgaacagtccgttaccgccgaaagcataggcatgcttgctcacctcaataccgacggtgaaaatcagcatttgcagcatccccatcgcggcagacaccgtgcctttactcatttcactggcgaacagcgtcaggcgcaccaggccggcattcgccacgccaataccaaacgcataaacgctcagccccgccgtcatccacaggtacgcatgggaagagactacggtcgccaccgccgcgataatcagccctgccgctatgggccagccacccataataatcagcgaacgcacggtacgtcgcgacgtcagacgcgccagcaccaggttaccgataatcagcgcgccaaaaatcggcacctgtaacaggccatactcatagctgctaagctgttcgccgctgatgataatgaccggcgactgggcaatccacgccagcagcggcaggctgacaaagcccgtcgccagcgcgcccgcgacaaaacggccgtttttcagcaccgccttataatcacgccccagttccttaagcgagagcttttcgcccaggcgggtggcggtctccggcatcgcacggtgcagcccaaagaaagagatggccgcaagcgcggcaaagaggacgaacatcccttcccacggcgcaacgtggacccatgcggctcccaccagcggccccagaagcggcgcaatcagcgccacgttcgccatcagcgcggttattttgatacataccgcctcctcaaacgactcctgaatagcggcgtagcccacggcgccaataaagcacaggctcacgccctgaaggaaacgcagcagcgtgaattgctcaatgttctgcgccagcagcgtggcgagacaggtgacgataaaccacaccacgcccgtcagcatcaccgggcggcggccaatacgatccgacagcggccctaaaagccactgtaaaaacatgccgcccgccagataggcggtcatggatgtaggtacccactcaatacctgcgttgtactgctcaaccacagccagcatgcctggctggatcatgtcgttgccgatgtaggtagagaattcgtaaagcaccagacacagaggaaaaagtaacgcctgacgacccagacgattaccggaagaagaacggtttatcatgcaatctctttagtatgaaaaaatcgcgatgagtgtaatgaattgccgctgtctgagatagcataatcacgtgaaaacacagaaataaggcacttatcgttgttgtttaaggtttccttaagttgccctccctatgatagtgctatttcacgttattgaccgaaactatgacacacgccgtcagcccttcagaattatctaagttaccgacaaataagacaaaaagcctttaccgtttgcctgcccgcttttatggttatcagcttttcgggctgatcgtccttgcgctgctttttacctggctttcgcgcgatgaatcgcttgaccgatggataaccggcttctggtatgacgcggcgacgcaccatttcccgctacagcaaaacccgctgctggatctgctgaaccatcggctggcgaaatatgtgaccattgcgctggctgccgcatcgctgatttacggcgcttacaaacgcaatgcccggctggtgacggccgcgcttctgatggggctgggggcgctggtagttggggtgctgaaaagcataagccaccacagctgtccgtgggatctggtggagtatggcggcaaagccgtctcgtatcccctgttcagcgccgttccggcagacagcggaccaggacgctgctttcccggcggccacgcctcaagcgggtttatggtgatggggttgttttttgccttctggcgtgaacgtccgcgcctggcctggtcctttgtcgcgttaggcgttgttatggggctgctgatgggattcgggcaggtcatgcgcggcgcgcattttttctctcacaacctgtgggccgggtggtgggtctggttttcccaggtgctggtttacgggctggtttccacctggtttgctaaagagtaacgagattatgttagaaaatctgaactacgaactgttttacctgctcaacgccacgccagcatcaccggaatggatgatcgatctcgccaccttcattgcgaaagatgtgatcagcattgtaccggcgctggcggtgatcctctggttatggggacctcgtacacaggtcaccgcccagcgccatctggtgatcaaaatggcgatggcgatcggcgtgagcgtgctggcaagctacgtgctgggccacgccttcccgcacgatcgtccgtttgtcgatcgcgtcggctacaacttcctgcaccatgcgccggatgactcgttcccgagcgatcacggcacggtgatcttcacctttgcgctggccttcctgttctggcatcgcctgtggtccggcatggtgctgatgggagtggcggtcgccatcgcctggtcccgcgtctacctgggcgtgcactggccgctggatatggtcggcggtttcctggtggggctgatgggctgcgtcagcgcagccatcctgtggagcctctttggtccggcgctttatcgtggattatcacaggcctatcgcgttctgtttgcccttccgatccgcaaaggctggatacgtgactaaccccggtccgtcaggttacacttgagcccccgccctgcgggggctcacttttttagcccgaggatctatggaaacacgtcgcgatgaccgcattgctcagctgcttcaggcgctgaagcgcagcgataagctgcatcttaaggaagccgctaccctgcttggcgtgtctgaaatgaccattcgtcgcgatctgaacagcgacagcgcccccgttgtgctgcttggcgggtatattgttctggagccgcgtagcgccagccattatctgttaagcgatcaaaaaacacgcctggtggaagagaagcgcaaagccgcgcggctcgccgcctcgctggtgcagccgcatcaaacgctgttttttgactgcggtacgacaaccccgtggatcatcgaggccatcgacagcaccgttccctttaccgccgtctgttattcgctaaacaccttcctggccttgcaggagaaaccggcgtgccgggtgattttgtgcggcggcgagtttcatgccagcaacgccatcttcaaaccgctgaatattcaggacacgctgagcaatgtatgtccggatatcgccttttactctgcggcgggtgtgaatgtgaaacagggggcaacctgttttaatcttgaagagttaccggtgaaacagtgggcgctcaacgccgcacagcagcatgtgctggtggttgatcacagtaaatttggcaaggttcgtccggcaaggatgggggaactgtcgcgctttgacgccatnnnnnnnnnnnnnnnnnnnnnnnnnnnnnnnnnnnnnnnnnnnnnnnnnnnnnnnnnnnnnnnnnnnnnnnnnnnnnnnnnnnnnnnnnnnnnnnnnnnnnnnnnnnnnnnnnnnnnnnnnnnnnnnnnnnnnnnnnnnnnnnnnnnnnnnnnnnnnnnnnnnnnnnnnnnnnnnnnnnnnnnnnnnnnnnnnnnnnnnnnnnnnnnnnnnnnnnnnnnnnnnnnnnnnnnnnnnnnnnnnnnnnnnnnnnnnnnnnnnnnnnnnnnnnnnnnnnnnnnnnnnnnnnnnnnnnnnnnnnnnnnnnnnnnnnnnnnnnnnnnnnnnnnnnnnnnnnnnnnnnnnnnnnnnnnnnnnnnnnnnnnnnnnnnnnnnnnnnnnnnnnnnnnnnnnnnnnnnnnnnnnnnnnnnnnnnnnnnnnnnnnnnnnnnnnnnnnnnnnnnnnnnnnnnnnnnnnnnnnnnnnnnnnnnnnnnnnnnnnnnnnnnnnnnnnnnnnnnnnnnnnnnnnnnnnnnnnnnnnnnnnnnnnnnnnnnnnnnnnnnnnnnnnnatccggctgaagaagccgccctcttccaccgcttccatcaccaccagcggacgctgctcaatggatttgccgttaagctggaaatctatcgtcccgaccacctggccttttttcaacggcgcggtcagctgtggctcggtcagggtatagctggctttcaggtttttcagctgaccgcgtggaatggtgacggaccccgcttcacctgcccccaagttcacttcacttttatccccaaaccagacgcgctggctgacgaaggtggcgtccggcttaatcggcgtgacggtttcaaagaagcggaaaccccaggtcagcagtttttcggattcattaaaacgaatgcggtcggttttcgtccccagcaccaccgagatcaggcgcatgtcgccctgcgtcgcggaggccaccaggttgtatccggccccggcggtcgtcccggttttcatgccgtccacgttaacgttactgctccagagcagacggttacggttaggctggcggatattgttgaaggtaaactctttctctttatggatggcgtactcatccggcacgtcatggatcagcgctttgcccagcagcgccatatcgcgcgcggtactgaactgaccgggcgcatccaggccgtgaacggttttaaaggtggtgttggtcagacccagtttttgcgcgtagccattcatcaacccaatgaatgagtcctgactgcctgcgacgtaatcggccagcgcaatacaggcatcatttcccgactgaataatgacccctttattcagatcggaaacggagacctgatcgccgggcttcaggaacatgacggacgagccgcgcagcgccgggttacccgtcgcccaggcatctttgccgacggtgaccatgtcatccagcttgatcttgcccgctttcaacgcctggccgacaacatagctggtcataattttcgtcaggctcgccgggtcgagtttttcgtcggcgttaccttccgccagcactttcccgctggcgtaatccatcaggatccaggcgcgcgcatcgacaggcggcgcttcgggcgccgtctgttccgccgcatggagcgttggggcaaaaaggaaaagcagcgccgagcctgccgccaggctgcgcagagaagaagttttttgcgtcataaatgccacccgagtgtccattctaaaaatcacgtcacaatcaccgtgtcgcaagaagcgatgagtaatagcgcactacagcgttcaaagaaacctgttccaggtaaagtttttaaagtttatgcaataacattcagatacgctttgattgcggcgttttttttagcatctgttgcgtaattgttaggtttatctcaccatggcgaaaagctgactcggattaacatctcatcgggagtaaatatgattacgctgtggggcaggaacaattcgactaacgtgaagaaagtgctctggacgctggaggagctggatttaccgttcaaccaaatcatggctggcatggcgttcggggtgaataaagacgccgactatctggcgatgaacccaaacggactggtgccgttgctgcgcgatgacgagacagacgccacgctgtgggagtccaacaccatcgtgcgttatctcgccgcgcagtacggccagggtcggctgtgggttgaaaatccagcccggcgcgcgcagggcgaaaaatggatggactgggcaaaccagacgctttcccccacgcaccgggtgatcctgatggggctgatccgcacgccggaagccgaacgtgattatcccgccattcatgccgcccaggacgcctgcgaatccctgttcgcgatgatggacgacgaactggcgaagcacacctggttctccggcgacaccttcggcgtgggtgatatcgccgtcgcccccttcgtctggaacctcactaacatgggtctcaactggaccccgcgccctcacctggagcgctggatccagcagcttagcgagcgcccggcgtatcgcaacgtggtgatgatcccggtgacctgattacgacccggacgggctgactttcagcagctgcccgtccgtctcgtcagtcagcacgtacagatagccatccggcccgacgcgcacatcgcgaatacgctgatctttatcgcccagaatgcgtccgtcctccgtcacggtattgcccttcacgctcagcacaatgacgtctttctccttcaacgcgccgataaacagcttgtttttccactgcgggaagacgtcgctgttgtagaacgccatgccgctgacggcgggcgatactttccagacaaacagcggtttttcggtgccctcaacgtgctcgcctttcgcttccgggattttcaggccgctgtaattgatcccgtgcgtcgccaggggccagccgtagtttttgcccttctcaggaatgttaatctcatccccaccgcgtggtccgtgttcgttgagccacagcgtgtcactccacggattcatcgccatcccctgcgggttgcgaatgccataggaccagatttccgggcgcgcaccggcggtgttcacaaacggattatccggcggcacttttccgtcctccgtcaggcgcaccaccttgccctgaagcttgtccagctcctgcgccgtcgggcgctggttgttttcacccaggccaataaagagatagcctttgccgtcgaacaccagccgtccgccaaagtggttgccggtagagagcttcggcatctgtcggaacaccacctggaagccctcaatgcgcgaaaggtcatcgctcaaccgcccgtagcccacggcggtacccgctttgccatcattacctgcctcggcgaaactgagccagacccgccgtgactgtgcaaaatccggggccagcgcgacgtccagcagtccgccctggccgctcgcccacactttcggcacgccgacaatcggatcggagagcccttttcctgcctgccagtgcttaagctgcccgtctttgagcgtgatgagcagccccttgttatctggcagaaacgccagcgaccaggggtgatccagttttgtctgtagcacgtcgaccttaaccgtctcaggcgctgcaagcagtgaaagcgggaataacaagactggaaggaaaatcaacgaggatcgaggcataacgcactcctttatcgacatatggcttaaagattagccactgttcccgggtgcgttaccacttttacaaaagcttaatcagaagggggagttgcctccccgggttcagtgccgggcaagcgtttccggcttgttcagacacatgatgcaaagcgcgagcgtggtcaggcagttttcaagcttctccgcgttaacggcaataaaattcgggcagtcgtgacgtccgttcatcaaacagaccccggcgatggagagcacctcggcggcgcggcgcaacgccactaattcgctttcagcgtagtgcgctttcaggatgggtgctttttcacgcatgaaattgcaaagttcaaagaagttatcacgcagattttcgctttcgctgactgacatataccctttcgccttgcggagttgcagatatgcggccaggtcgattcgggcgttgatcagcttgttaagcagatcgcgtttcagtctgtcaacggacatgctacttcctcccctgtcagccatgttaccttattaaggataaggtcattttttgtacaatgtaatgcctgagatcaataaacgataactgattaacattctttacaatgttacaacgattgcccgcctcaactgcgccatcaagagtgtataaatcccccgcgatacgctgtaaaatcccgccctgataactccataattgatgaatttttaacctatgagcaatgttacgcacccgccgaaaatcggctttgtctccctcggctgcccgaagaacctggtggactccgaacgcatcctgactgaacttcgcactgaaggctatgacgtggtgccaagctacgacaacgccgacatggtgatcgtcaacacctgcgggttcatcgacagcgcggtccaggagtcactggaagccattggtgaagccctgacggaaaacggcaaagtgattgtcaccggctgcctgggcgcgaaggtggatcagatccgcgaagtgcacccgaaagtgctggagatcaccggnnnnnnnnnnnnnnnnnnnnnnnnnnnnnnnnnnnnnnnnnnnnnnnnnnnnnnnnnnnnnnnnnnnnnnnnnnnnnnnnnnnnnnnnnnnnnnnnnnnnnnnnnnnnnnnnnnnnnnnnnnnnnnnnnnnnnnnnnnnnnnnnnnnnnnnnnnnnnnnnnnnnnnnnnnnnnnnnnnnnnnnnnnnnnnnnnnnnnnnnnnnnnnnnnnnnnnnnnnnnnnnnnnnnnnnnnnnnnnnnnnnnnnnnnnnnnnnnnnnnnnnnnnnnnnnnnnnnnnnnnnnnnnnnnnnnnnnnnnnnnnnnnnnnnnnnnnnnnnnnnnnnnnnnnnnnnnnnnnnnnnnnnnnnnnnnnnnnnnnnnnnnnnnnnnnnnnnnnaccaaagcacaacccgttcctgagcctggtgccggaacagggcgtgaagctgacgccgcgccactacgcctacctgaaaatttccgaaggctgcaaccaccgctgtaccttctgcatcatcccgtcgatgcgtggcgatctggtgagccgtccgattggcgaggtgctggcagaagccaaacgcctggccgacgcgggcgtgaaggagctgctggtcatctcccaggacacctccgcctacggtgtggacgtcaaacaccgctccggtttccacaacggcgagccggtgaaaaccagcatggtcggcctgtgcgagcagctggctaagctcgggatctggacgcgcctgcactacgtctacccttatccgcacgttgacgatgtgatcccgctgatggcggaaggcaaaatcctgccgtatctggatatcccgctacagcacgccagcccgcgcattctgaagctgatgaaacgtcctggctccgtggatcgccaactggcgcgcatcaagcagtggcgtgagatctgcccggatctgaccctgcgctccacctttattgtcggcttcccgggtgaaaccgaagaagatttccagatgctgctcgacttcctgaaagaggcgcgtctggatcgcgtcggctgcttcaagtacagcccggttgaaggcgcaacggccaacgagctggcggaccaggtaccggaagaggtaaaagaggagcgctggaaccgctttatgcagctgcaacagcagatctctgctgaacgcttgcaggagaaagtgggccgcgaaattctggtgattatcgacgaagtggacgaagaaggcgcgattggccgcagcatggcggatgcaccggaaatcgatggcgcggtgtacctgaacggcgaaacacaggttaagccgggtgatattattcgcgtgaaggttgaaaacgcggatgagtatgacctgtggggtagccgggtttaaacaccctgcttcccttttgtaggccgggtaaggcgtagccgccacccggcacatttcactgcactaccccttaatcctcgggtccagcgcgtcgcgcagcccatcccccagcaggttaaacgccagcacggtcaggaaaatcgccaggctcgggaagatcgccacgtgtggcgcaatcaccatatccgcccgcgcctcgttcagcatcgccccccactccggcgtcggcggctgtgcccctaaccccagaaacgacaggctggccgccgagataatcgacacgcctatgcgcatggtgaaatagaccacgatagacgagaccgttcccggcagaatatggctgaacaggatggtggcatcgctggctcccatgctgcgcgccgactcgataaaggtctgctgcttcagcaccagcgtgttgccacgtaccagacgcgcgaaagcgggaatcgagaataccgccacggcgataatgacgttcgccatgccgctgcccatcaccgccaccacggcaatcgccagcagaataccgggaaaggcaaacagcacgtcgcagatacgcatgatgatgcggtcccaccagccttcgtagtacccggccaccagccccagcacggtgccaattgctgcgcccatcagcaccgcgaagaccccggccgccagtgagatctgcgcccctaccagcacgcggctgaatatatcgcgcccgagcgagtccacgccaaaccagtgcatcatcgacggaccatcgttcagccggtcgtagtcgaagtagttttccgcatcaaacggggctatccagggggcgataatcgccaccaggatcagcagtaacacaaacaacccggcgaccatagcgacgggctgacgacggaatcgacgccagaactcaacccacggggtgcgaatatggtccggcctgatccccggcatagcgtttaaaatggcctggcgacgccagttcagtaatcgcatcttacttatacctgatggccgggttaatggcggcgtaaagcacatccaccactaagttgataagaataaactccagcgagaaaagcaggacttcagcctgaataaccggatagtcacgcatatcgaccgagtcgaccagcaggcgccccagccccggccagttaaagaccttctcaaccacgatagagccccccagcaggaagccgaactgtagccccatcatcgtgaccaccgggatcatcgcattacgaaaaccatgcttcagaatgacccatttctcactcaccccttttgcccgcgcggtgcgaatgtaatcttcgctcagcacgtcgacaaacgaggcgcgggtaaatcgggccataaccgccgcaacggccgcgcctagcgtcatagagggcagaatgtagtgcttccaggtgtcggccccgacggtcggcaaccagcccagctcgacggagaaaatctgcatcagcagcatgcccagcgcaaacgccgggaaagagatgccggtgaccgccagcgccataccgagcttatccggccagcggttgcgccagacggcggcgacaatccccgcgcccaggccaaagacaaccgcccagctcatactggcaatcgttaaccagaaggtaggcataaagcggctggcaatctcctccgacaccggacgacgcgacaccattgagatgccgaaatcgccctgaaggacattgccaatgtaacgcagaaattgcctgtacagcggctggtcaagaccgagctgtttacgcaccagttcaataaccgtcgcatccgcttccggtccggcaatcaaacgcgccggatcgccgggcagcatatgaacaaacaaaaacaccagcacggccacaatcagcagcgtcgggataagccccagcaggcgtttacacacataattcagcatgagttttatttcaaatccgcgtcatcaaagctaaagcccgtatccggcatgatgtaaaaaccggtcagcgctttgttgtgggctgagaccagtttttccaccaccagcggcacccacggcgactctttccagataatgtcctgcgcctctttgtacaggcgtgctttctcttccggtttggtggttttcagggcatcggccagatctttatccacctgcggattactgtagaacgcggtattgaacagcgttggcggccagttctgggaagcaaaaagcggcgacagggaccagtccgcttctccggttgaagccgtccagccggtgtagaacatccgcacgccgctctctttctgtcctttgccttccacttccgccgctcgctgtccggcatccatcgccgtaaccctggctttaatgcccacctgcgccagctgctgctgggtaaattgcagcaccttctgcgcggtactgtggttatgcgacgaccacagcgtagtgctaaagccgttcggatagcccgcctctttcagcagttcccgcgctttcgccggatcgtaaggccacggctgatagctttgcgcgtactcaatggttggcggcatcacgcccgtcgccggggtggcgtagccggcaaaggccaccttcaccagcgcctggcggttaatggcgtagttgatggcttcacgcaccttcgggttatcaaacggtttctgcgtaacgttcatactgatgtagcgctgcatgatcgacgggctggccaccagttccagcttgctgtttttcgccagcagcgcagcctgttcgtacgggatcgggaaggcaaactgcgcttcgccggtttgcagcattgcggcgcgggtgttgttgtccactaccggccgccaggtgatggtatccagcttcggcagcccctgctgccagtatccggcgaattttttcaccttcacaaaatcggtctggttccaggtgagcagttcgtacggtccggtccccaccgggtggaagccaatctctttgccatattttttcagggcggcgggcgaaatcatcgccgtcgcgggatgcgccaggatattgataaacgccgagaacggctctttgagggtgatcttcaccgttgccggatcaaccacctcggtttgggcgatatttttatacaggttgtagcgtttaagaccgttttccggattgctggcacgatccaggttgaccttaaccgcctcggcgttgaagtcggtgccatcctggaacttcacgccggtacggagcttaacggtatagaccagcccgtcgtccgacacggtatagccttccgccagcacgtttttcagcttcatttcgcggtccaggccgaacagcccctggtagaaggattttgccaccgcctgagaaagagtgtcgttggcatcatacggatccagggtcgtgaagttagaccccacagccaccaccacatctttcgccgcgaacgcgggggcggcggccagcgcagccgtcacgctcgcggccagcagccatttacgagcaacaaaaggaaccattgtgttctcctgcctgttgtaagttataaccgcgagaatgcattgccctgacgcggtggtgcgacaaaatgaccgggtcccacctcacgcagcgccacgcgctccagggtttcgccccgtttacgaatattgctcggcatttcgtcctgcaacagcacgcgctgggcgtgacgatgctcaggatcggcaaccggtacggcagccatcagcttgcgggtgtacgggtgctgcgggttttcaaacaccgcccgacgggggccgatttcaacaatttgccccatgtacatcaccgccacgcgatggctgatccgctccaccaccgccatatcgtgggagataaacagaaacgcaatgcccaaatcccgctgtaaatcgagcaggagattgataatttgcgcgcggatagagacatccagcgctgacacggactcatccgcaatcaccactttcggattgagggccaatgccctcgcaatgcagatacgctgacgctgaccgccagaaaattcgtgcggataacgccaggcatgctccggcttcaggcccacgcgctccagcagccatgcgacgcggcgctgcgcggcttcaccgtcgagcaggttatgcacccgcagcggctccataatcgagtaccccaccgtatggcgcggatcgagcgacgcataaggatcctggaatataaactgaatatcccggcgcaccgcctgcaatttactgttagggagcgtgtcgatgcgctcaccgttgaaggtgatgctcccctcctgcgacgccaccagcctgagcagcgcccgcccggtggtggatttaccgcagccggactcccccaccagcgccagcgtttcgcccggccagagatcaaaactgacgttttcaaccgcatgcacttcgcgcttcacgcgattgaggatcccgctacgcagcgggaaacgggtcaccaggtcacgcacttcgaggattggcctgccgggaaccaccgtatcctgctcggtttcgtcttcctgctggccctgttcggtctgtgagaacagcggaaaacggcgcggaaaatcactgccattcatggcccccagacgcgggaccgccgccagtagcgctttggtataaggatgcaccggcgcatgaaagacctgctccaccgtgccggtttccacggcattgccctgatgcataaccagcacccgatcggcaatatccgccaccaccccccatatcgtgggtgatgaaaatcacccccatctccatctcctgctgcaacaccttaatcagttgcaggatctgggcctgaatggtgacatccagcgccgtggtgggttcgtccgcaatgagcaccgccggacggcacgacagcgccatcgcaatcatcacccgctggcgcatgccgccggaaagctgatgcggatagcgggacaaaatcgcgtgcgcctcagggatacgcaccagctccagcatccgttttgcttcgttgagcgcctcatcaccgctcagtccctgatgcaggcggatagattcggcaatctgctcgcccaccggaaaaaccgggttcagggaggtcatcggctcctgaaaaatcatcgcaatatctgccccgcgcaccccctgcatctgggacgcactcagctcgttgagatcgataacctgacggttgcgacggcgcaacagcatccgctcgctggtgacctgcccgcccgtctgctcaagcagacgcatcagcgccagcgcggtaacggatttaccggaacctgattcgccaacaatcgccagcgtctcgccgcgcctgagcgaaaacgataaattctgtactgcggggatgaactgccgctcttcctgaaacgcaatattcagttggtggacagccagcacttcgcagttgtccagctcttcacggtgcggcacgcaatgcccccttattcacgataaatgcctgtgctgggcgcatcgccggcatacccccacgcccggtacatcccttcactgttgaacggcagagccacgttgccctcccgatccaccgcaattaagccgccaatcccgcccagcgccggcagtttctccatcactacccgctcgcaggcctcactcaggcttaatccgccgtaatccattagtgcggtaatgtcgtaggccgccagcgcgcggataaacacttcgccggtgccggtgcatgacaccgccgcggtggcgttattggcgtaacacccggcccccggcagcgggctgtcgccgacgcgaccgggaagtttgttggtcataccgcctgtcgacgtcgcggcggcgagattaccggctttatccagcgccaccgcgcctaccgtgcccattttgctgcgttcatcgagcggcgcggcatggtccagctgcgtcatccccgctgtacgggcctccagcagttgccggtaacgctcctcggtggaaaaaagatcgggcgagaccgtgtccatcccgtgctcgacggcaaatttttccgcccccgccccggccagcagcacatgcgggctttgttccatcaccagacgcgcggccagcaccggattacgcagacggctgacgcctgctaccgcgcccgccttcagggtgacgccgtccatcacgcaggcatccagctcgtgcgtttcatcgcgcgtaaagaccgagccaataccggcattaaacagcgggcactcctccagcagacgtactgcttcggtcaccacgtccagcgcgctgtcgcccgcttccagcatccgctggcctgtttccacaatggcgttcagcgcatcaatataacgcttctcctgctcgggactgagctgtgcacgggtgattgccccggcaccgccatgaattgcgataaccgctttactcatttcgcatcacccatcagcctggctggctgctttttctataaatatcattatcgtcgacgaatcttcagatgatttttgaatatagaaagacgcaactgtgatgtaaagcgtacacccatcgggtcatacagttagccgcacttttctgccataatgagcgctttcgttgttactccgcaggagcccaccatggattttaccgccggactgatgccgcttgagacggcactctcgcagatgcttgatcgtattactccactgcacgacgttgagacactgccgcttgtgcgctgttttggccgtattgccgcgcgcgatatcgtctcgccgctgaacgtgccggggtttgataacgcggcgatggacggctatgccgtacgtctggcggatctgcaaacgggtcagccgctgccggtggcaggtaaagcgtttgccgggcagccgttcaacggtgagtggccagcgggcacctgtgtgcgcattatgaccggggcaccggtgccaaagggctgtgaagccgtggtgatgcaggaagagaccgaacaaacggacgacggcgtgcgctttaccgccagcgtcaaagcgggacaaaatatccgccacatcggggaagacattaccctgggcgcaacggtctttgccgccgggcaaaagctgacggtcgccgaactgccggtgctggcatcgcttggcatcgcggagattgacgtggtccgcaaagtgcgcgtggcggtgttctccacgggagacgagctacagcttccgggtcagccactgaacgaggggcagatttacgacaccaaccgtctggcggtgcacctgatgcttgagcagctgggctgtgaggtgattaacctcggtatcattcctgacgatccgcaaaaactgcgcgcggcgtttatcgacgctgacgcctctgccgacgtggtgatcagctccggcggcgtatcggttggcgaagcggattacaccaaaaccctgcttgaagagctgggcgaaatcgccttctggaagctggcgattaaaccgggcaaaccgttcgcgtttggcaaacttccgcacagctggttctgtggcctgccgggtaacccggtctccgccgcgcttaccttctaccagctggtgatcccgctgctggcgaagctttcaggcaacaatgccagcccgctgccggagcgtgtgcgcgtgcgggcggcaacgcgcctcaaaaaatcaccgggccgtctcgatttccagcgcggcattctggcgcgcaacgccgacggcgagctggaggtgagcactaccgggcatcagggttcgcacatctttagctccttcagtcaggggaactgctttatcgtgctggagcgcgatcgcggccacgttgaggcgggcgaatgggttgaagtggaacgctttaaccacctgttcggaggctgacatgacggtggaactgagcgacccggagatgatgcgctataaccgccagatcgtgctacgcgggtttgatttcgagggccaggaagcgctcaaggcggccagcgtgctggttgtgggcctgggcgggctgggctgcgcagcggcgcaatacctggctgcggcgggcgtcggcagcatgacgctgctggatttcgacaccgtgtcggtgtccaacctgcaacgccagacgctgcacagcgacgcgacggtcggtcagcctaaagtggaatcagcacgcacggcgctggcgcgcattaaccccaacgttcagttcaccctgattgacgcgatgctggatgacgacgcgctgtttgcgcagattgcacggcatgacctggtgctggactgcaccgataacgtcgccattcgcaaccagctcaatgcggggttgctttgcccataaaacgccgctgatttccggcgcggccatccgcatggaggggcaaatcaccgtcttcacctacgctgaaggagagccctgctaccgctgcctgagccgtctgtttggcgagaatgcgctgacctgcgtcgaggcgggcgtgatggcgccactggttggcgttatcggttccttgcaggcgatggaggcgatcaaagtgctggcacactacggcacgcccgcagcgggtaaaatcgtgatgtatgacgcgatgacctgccagttccgcgagatgaagctgatgcgtaatcccgggtgtgaggtgtgtagccagtaaaaaagtcgggtggcggcttcgccttacccgacctacaacggcccgagcgtaggccgggtaagcgtcagcgccacccggcaacagcgtcaaatagacgtccgcccaaacgccccctgccagtcctgctcaaacttcacaattgccgcatccacggccggagaggtaataaactgctgcgccacgtccagcggcagcgtgatggactcgcaccctgccagcaggcagtccagcgcctggcgcggggttttaaagctcgccgccagcacttttgactgcggggcatgcagggtcagcagctgttgcagttcaaccaccgtctggatcccgtccccgccctgtgcgtccacgcgatttacataaggagccacatactcagcccccgccagtgcggagagcatcccctgtgctgcgccatacaccgccgtacccagcgtcgggatcccttctgctttcagcattttgatcgccgccagtccttcagcggtcacgggcactttcaccaccaggtcattgattatcgcgcgcagcttacgtgcgtcttccaccattccctcggcggtcttcgccatcacctgagcgaacagccggcccttgccgcccagcgcgtcgtgcagcgcgggcagcagctcttccagaggcgttttacccgccgccacaatgcttgggttagtggtcacgcccgccagcgggaagatacgcgccagctttttgactgccgcaacgtcagatgtgtcgagataaagttccatgatgtcaccctcaaaattagcctgcacttaccctatcacagcaaaacctgctcaggaattgacccatatcaagataactttcattcgaaagtaatttaatcttcatatgtaattcgagggcaagaaaatgatcttcaatatacagcgttactccacccacgacggtcccggtattcgaaccgtggtattcctgaaaggctgctcgctgggctgtcgctggtgtcagaacccggaaagccgctcccgcacgcgggacgtcctgtttgatgcccgcctgtgcctggacggctgtgacctgtgtcagcaggccgcgccggggtgtgttgaacgcgcgctgaacgggctggtcattcatcgtgagaagcttaacgacgagacgctcactgcccttaccgactgctgcccgacccaggcgcttaccgtctgcggtgaagagaagcaggtggaggagattatggccaccgtgctgcgcgacaagcccttctacgaccgcagcggcggcgggatcaccctctccggcggcgagccgttcatgaacccggcgctggcacatgccctgtttaaagccagccatgaacaaggcattcataccgccgttgaaacctgccttcacgtcccctggcattatatcgagccgtcactgccgtatgtcgatctattcctggcggacctgaagcatgtggacagtgacgtattcaaacagtggaccgatggctcagccagacggatcctggacaacctgaagcgcctggctgccgccgggaaaaaaatcaccattcgcgtgccgctgatccagggctttaacgccgatgaagcgtcggttaccgccattaccaatttcgccgccgacgaactcggcgttcacgatattcattttctgccgtatcacacgctgggcatgaacaaatacaccctgctcggccaaccctactctgcccctgacaaaccgctggataaccctgccctgctggacttcgcacagcagtatgcctgccagaaagggttaaccgcgaccttacgaggataaacttatgaccaccctgaatctcaacaccctcagcgagcgcatcaaggcgcacaaaacggcgctggtacatatcgttaagccgccggtctgtaccgagcgcgcgcagcactataccgaaatgtatcagcagcatctggacaagccgatcccggtacgtcgcgcgctggccctcgcccaccacctggcaaaacgcaccatctggatcaaacacgacgagctgattatcggtaaccaggcaagcgaagtgcgcgccgcgccgattttcccggaatataccgtctcctggattgagaaagagattgacgatctggcggaccgtccgggcgcgggctttgcggtgagcgaagagaacaagcgcgtcctgcatgcgatctgcccgtggtggcgcggccagacggtgcaggatcgctgctacggcatgtttaccgacgagcagaaaggcctgctggaaaccggcatcatcaaagcggaaggcaacatgacctccggtgacgcacacctggcggtgaatttcccgctggtgctggagaaaggtctcgacggcctgcgcgcgaaagtggccgagcgccggtcgcgcatcaacctgacggtgctggacgatctgcacggcgaccagttcctgaaagccattgatatcgtgctggaagccgtaagcctgcacatcaaacgctttgccgacctggcgcgtgaaatggccgcgacagaaacccgcgacagccgccgcgacgagctgctggccatggcggaaaactgcgacatcatcgcccaccaaccgccaaaaaccttctggcaggcgctacagctgtgctacttcattcagctgatcctgcaaattgagtccaacggtcactccgtctcctttgcccgtatggaccagtacctttacccgtactaccgccgcgacgtggagctggaccagagtctggatcgcgagcacgccattgagctgctgcacagctgctggctgaagctgctggaagtgaacaaaatccgctccggctcgcactccaaagcctctgcgggcagcccgctgtatcagaacgtcaccatcggcggccagaagctggtcaacggtgaaccgatggacgcggtcaacccgctctcttacgccattctcgaatcctgcggccgtctgcgctccacccagccgaacctgagcgtgcgctaccacgcgggcatgagcaacgacttcctcgacgcctgcgtgcaggtgatccgctgcggcttcgggatgccggcgtttaacaacgatgaaatcgtgatcccggaatttatcaagctcggcgtggaacgagaggacgcgtatgactatgcggcgattggctgcatcgaaaccgccgtcggcggcaagtggggctatcgctgcaccggcatgagctttatcaacttcgcccgcgtgatgctggcggcgctggaaggcggtcgcgacgccaccagcggccaggtgttcctgccgcaggaaaaagcgctttctgccggtaatttcgggaatttcgatgaggtcatggcggcgtgggataaccagatccgctactacacccgcaaatccattgagatcgagtacgtggtggacaccatgctggaagagaacgtccacgatattctctgctcggcgctggtggacgactgtatcgaacgcgcgaaaagcattaagcagggcggcgcgaagtatgactgggtttccggcctacaggtggggatcgccaaccttggcaacagcctggcagcggtgaagaagctggtgtttgaccagggcgttatcggtcagcaacagctggcggcggcgctggcggatgacttcgaggggctgacccacgagcagctgcgccagcgcctgatcaacggcgcgccgaagtacggcaacgacgacgacagcgtggacctgctgctgacccgtgcctacgaaacctacattgaagagctgaagcagtaccataacccacgctacggccgcggcccgattgggggtaactactatgcgggcacgtcgtctatctccgcaaacgtgccgtttggcgcagcaaccatggcaacgccggacggccgtaaagcccacaccccgctggcggaaggggcaagcccggcctccggtaccgaccacctcggcccgacggcggtgattggctccgtgggtaaactgccgacggaagcgattctcggcggcgtgctgctgaaccagaagctgaacccgtcgacgctggaaaacgacagcgatcgccagaagctgatggtgctgctgcgcaccttcttcgaggtgcataaaggctggcatattcagtacaacatcgtctcccgtgaaacgctgctggaagcgaagaaacacccggatcagtatcgtgacctggtggtgcgcgtcgcgggttactcggcgttcttcaccgccctgtcgccggatgcgcaggacgatattatcgctcgtactgagcatacgctgtaaaaaaacgcccggtggcgctgcgcttaccgggcctacattgttcccccgtaggccgggtaaggcgaagccgccacccggctttctgactttcattcgaaattaaatttgtgctccccgtcaccttgttattagaatgtttcaaaacgcagtgacccaggagcacagtatgaccgtaaaagttatcgtcaccgatatggacggaactttccttgatgatgccaagcagtacgatcgtgaccgcttccaggcacagtttgagcagcttaaagcccgcaacattgaatttgttgtcgccagcggcaaccagtattaccagctcatctcctttttcccggagctgaaagatcagatctccttcgtcgcggaaaacggcgcgctggtcttcgatcacggcgaacagattttccacggcgaactgacgcgtcatgagtcgcagatcgtcattggcgagttgctgaaagacaaagggctgaactttgtggcctgcgggctggagagcgcgtacgtaagcgataaagccccggacgcgttcgtggcgctgatgtcaaagcactaccaccgcttaaagcgcatcagcgattaccgcgacattgacgacgtgctgtttaaattctccctgaacctgccggacagcgatgtcccgaatctggttgataaactgcatgtctccctggacggcatcatgaagccggtcaccagcggcttcggttttgtcgatttgattatccccggcctgcacaaagccaacggcatcagccgcctgctgaaacgctggaaaacctccccgcaggagtgcgtcggcattggcgacagcggcaacgatgcggaaatgctgaagctggtgaaatactcgtttgcgatgggcaacgcggcggacagcattaaagcggtcagccgttacgctaccgacgataacaaccatcagggcgcgctgaacgtgattcaggccgtgctcgacgcgcactccccgttcgacgcctgatccccctacctgccggagcctcgctccggccccctcactcttttcccatcctgtggcacccgtcaaggttttaaacttgcattaactttttttaacttaaagtatcacttgtagacacttttactttcgaatgaaagatgcgaggcagttatgacctttaccagcgaaacgttgccagcggaccataaagcggcaatccgtcagatgaaacgtgaattacgcgcgcagatcggcgatgtgcaggcggtgttcgaccggctcagcgataaaatcgccacccgcgtggcggaaatcaacgctctcaaaaacaaaggcgaaaccgtctggccagtgatcccctttgccgacgtgaaaaacggcacgatcaccgccgaacagcgcgaagcggttaaacgtcgcggctgcgcggtgatcaaaggccatttcccgcgcgagcaggcgctggcgtgggatcagccgatgctcgactacctcgatctgaataagtttgacgaggtgtataaaggacccggcgataacttcttcggcaccttaacggcctctcgtccggagatttacccgatctactggtcgcaggcgcaaatgcaggcgcgccagagtgaagagatggcgcaggtacagtcgttccagaaccgtttatggacatttgagagcaacggcaagcagtggttcgacccggacgtgagcgtgatttacccggaccgcatccgccgtcgtccaccgggaaccacctcgaagggacttggcgcacacactgattctggcgcgctggagcgctggctgctgcccgcttatcagcaggtctttgcccgcgtgtttgacggcaacgttgataaatacgatccgtggaacgccgcgcaccgtaccgaagtggaagagtacaccgtggataacaccaccaaatgctcggtgttccgcaccttccagggctggacggcgctgtcggacatgatccccggacagggcttgctgcacgtggtgccgatcccggaggcaatggcctatattctgctgcgtccgctgctggacgacgtgccggaagacgagctgtgcggcgtggcgccggggcgcgtgctgccgatttctgagaagtggcacccgctgctgatcgaagcgttaaccagcattccggcgctggaagccggtgactccgtgtggtggcactgcgatgtgatccactccgtcgcgccggtagaaaatcagcagggctggggcaacgtgatgtacattcctgccgcgccaatgtgcgagaagaatctcgcctatgcgaaaaaggtcaaggaagcgctggaaaccggcgcgtcgccgggcgatttcccgcgcgaagattatgagaaaagctggcagggccgctttaccgtgaacgatctcaacatccacggcaggcgggcgctgggcatggcttaaccgtcgtacagcccttcccgctccacggcggtgcgtcgtttcccctgacgtatccgccgtaccgactcccgaacggtcagcgtaccgtttagcaggaatgttcctaccggcgcgtccgggcgcatcagccgctgctggagcatatgcaccgcttccgttcccagctcatcacgcggaacatgtaccgcggttaagggcacatcctgaatcgccgcgagattaaagccgtcgatgctcatcaccgagacatcctgcggcacgcgcagaccgtgtttttggagcgcgctgatggtccccgccgccataaaatcaccaccaaccaggaacgccgttggcaggtccttccctttctgctggtgaagccactcgcttaccagctgctccgtctctctggcgctgaagctggacaccatcagcaggtcgcgcctgtcgctgaacctgaggttatgaccgtgccacgcgtcgcggatcccggacaggcgcagctccatggtgtagcgacgcaggcacagcacgttcatcacctcccggtgccccatctcgaacaggtactctgccgcccgctcgccaatcgcgcgatgatccggcgcgacggcgggcaggcgcatgtggcggtcccggcagttaatcagcatacagggtttgcccacgtctaccgccagatcgtggatatgcggatcgtcgataccaaggaggatcgccgcctgggtgtccgcttcgttcatgcgggccagaaacagctgggcatcgctgtcgttcacctccagcgcacagtaacgcagacgcacctcgtgcgaggccagccctttgctcacgctctggatgacgcggtagtaaaagatgtcggaccgctcgtcaaacgcccgctgcggggcaaacaccaccaggctgttaagcagcagacgccccgccgccatgccgtccattacccccagctcccgcgcgcacgccagcacctttgcccgtgctttttcgctggtgtttgccttccccgccagcacgcgagaaacggtgctgatggagagctgcgtccgggcggcgatttcggtgattttaagccttttgtccattttgtgatctggctccggatgtgaaatgaaaaaattttcacaacatgtttatcaggtaataacttgcgagaaggccataatgccgaaaattaaacctcagttatgagaaagtttgcacaaaatacactattccctgcccaatttctttcttaaggtgaacctgtcacacaacttccatactagttgtatagcagcttagcgctctaaaacagataactttcaaacgcctgacgctgtgtgacacctgaacctttgtccccttaccgtccgtcttgtggagaagaaaatgagtcaggacatcaataacaccgtagcgacaagcaaaacacgtcgcgtcatcaggaacctgcgctggtacgtactggtgctgtttcttctcggcgtgaccgttaactacatcacccgtaactcgttaggtattctcgcccctgaactgaaagagagcctcgggatcaccaccgagcagtactcctggatcgtcggcgcgttccagatcgcctacaccattttccagcccctgtgcggctggctgattgacgttatcggcctgaaaatcggctttatggtctgcgccgggatctgggcgctgatgtgtatcttccacgcgggtgccggaagctggctgcacctggcgattctgcgcttctttatgggtgcgtccgaagccgccgccacgccagcgaacgccaaaaccatcggtgaatggttcccgaaatcagagcgccctgttgccgcaggctgggcgggggtaggcttctccattggggccatgctggccccgcctatcatctactttgctcacgcgtcgttcggctggcagggtgcgtttatgtttaccggcgtgctggcgctgctgtgggtgatcctgtggtgggcgttttatcacaacccggaacagcacccaaacctgagccgcgatgagctggcgtttatcaagcaggataacgaacctgcgccggtcaaactgcccttcctgaccgcgctgaaaaccgtctcgaagaacaaacggttctacggtatcgccatcccggcctttatggcggaaccggcctgggccgtgctgagcttctgggtgccgctgtacctcgccaaagagcacggtatggatttgaaacagatcgcgatgttcgcctggctgccgttcctggccgccgacctcggcagcgtggcgagcggctacctgacccggctctacacccgctggtttggctgcacccgcgttaactcggtggtagccagctccgtcaccggcgcgtttctgatgatttctctggccgtcgtggccgtgacccgcgacccgtatatcaccatcgtgctgatctctatcggcggcttcgggcaccagatcatctcctgcatgctgagcgccctggtcgtggagtcgttcgacaaaggccagatggcgaccgtcaacggcatgcgcggctcggcggcgtggatcgccagcttcctgttctcactgttaatcggtgtgaccgccgacaaaatcggctttaacccgctttttattgccatgggcttctttgacctgattggcgctgtcttcctggtagcatttattgctgaacgtcgcgccaagcgcgcctgatagtggatgtattgcatatgaaaaccctgaaaaactggaccgtagataagcagtcagcaaaccatctggaactgctgatcgataatcagcaccgcctgtgtctgtatgtgctggaagagaatctgttccgtgtgctgatcaaacgtaaaggcgagctggcgctgaaccgcacctggagcatcgcgccggaacaagatgtgccgtgggaaggccgccgtcgtgacgatgtcagcggcttcacctgccctgcctggacgctgacgcagcaggacgacacgttaaccgtagcgactgaacagctgcgcgtcaccgtccaccagccgctgtggctggagtggcactaccgcaatgaggcgggcgagtggcagccgctggtcaatgaccgcccgaccagcgcctacctgctgaacgcccacggtgacggcgtggcgcactatcttagccgtcgtaaggatgaacgtttttacggtctgggtgagaaagcgggtgatttacagcgcaacggcaaacgctatgagatgcgtaacctggacgcgatgggctataacgcggccagcaccgatccgctttacaagcacatcccgttcaccctcacccgtcgcgatgacgtgagctacggtctgttctacgataacctgagcagctgctggctggatctgggtaacgagatcgacaactatcacaccgcctaccgccgctggcaggcggaagcgggcgatattgactactacctcttcaccggcaagcgcgtgctggacgtgaccaaagccttcgtgcgcctgacggggaaaacgctgttcggaccgaaatggagcctgggctacagcggctcgaccatgcactacaccgacgcgccggacgcgcaaaaccagctgatgaacttcatccgcctgtgcgatgagcatgccattccgtgcgactcgttccagctctcctccggctatacctcgattaacggcaagcgctacgtctttaactggaactacgacaaagtgccgcagccgaaggtgatgagccaggcgttccacgacgcggggctgcggcttgcggccaacatcaagccgtgtctgttgcaggatcatccccgctacagcgaagtggcggaacgcggcctgttcattcgtgattcagaaaccgatgcgcctgaacgttccagcttctgggatgacgaaggatcgcatctcgacttcaccaacccgcagacggtgcagtggtggcagaacggcgtgaccatgcagctgctggagatgggcatcgactccacctggaacgacaacaacgagtatgaagtgtgggacggggaagcgcgctgctatggcttcggtcaggagatcgccatcaagcacattcgcccggtgatgccgctgctgatgatgcgcgcctcgctggaagcgcagcagcgctttgcgccggagaaacgtccgtatctgatctcccgctccggctgtgccgggatgcagcgctacgttcagacctggagcggcgacaaccgcaccaactgggacaccctgcgttataacatccgcatggggctgggcatgagcctgtccggactgttcaacgtcggtcacgacgtcggcggtttctccggcgacaagccggatgccgagctgttcgtgcgctgggtacagaacggcgtgatgcacccgcgctttaccatccactcgtggaacgatgaccacacggtgaacgagccgtggatgtacccgggcgtcacgtccgcgattcgcagcgccattgaactgcgctaccgcctgctgccgtatctctacaccctgctctggcaggcgcacgccgacgatgagccgatgctgcgcccgaccttcctcgatcatgagcacgatgcgcagacctttgaagagtgcgacgacttcctgctgggccgtgacctgctggtggccagcgtcgtcgaagccgggcagcgcgagcgccgcgtctggctgccggataacgaaacgggctggtacgatttttacacccacgcgtggtatgcgggcggccaggcgatcgtccttgatgcgccgctggaaaagctgccgctgctggtacgcgccggggccggtttgccgctcagcgaacgcatccgtcacgtgagcgccgataaagacgatacccgtgagctgaaactgttcccggtgaaaggcgtcggcaccaccgccgggctgctgtttgaggatgacggcgaaagctggggctaccagaacggcaacgcgctgtgggtggaatgggagatggagtgcgacggcgcaagtatcaacctgaaggtgaatgcgcgcggcgactatcgtccggcatggaaggcgctgaaggtgtcattaccggcgggggaaaaacgtacgttgcgggtgaacggagttgaagggggcgagtgggtggtgtagtgcggcctgttgccctcaccctaaccctctcccacagggagaggggatagaacgtaggccgggtaaggcgaagccgccacccggctatttttttaactctcgatacctttactgcgcaggtaatcttcgtagttaccggtgaagtccaccacgcgctctggcgtaatttcgatcacgcgggtcgccagcgagctgacgaactcccggtcgtgagagacgaagatcagggtgccctgatacatctccagcgccatgttcagcgactcaatagattccatatccaggtggttagtcggttcgtccatcaccagaatattcggtttttccatcatcagcttgccgaacagcatacggcccttttcaccaccggagagcactttggcgggctttttgatgtcgtcctggctgaacagcagacgccccagaatgctgcgtaccgcctgctcgtcgtcgccttcctgcttccactggctcatccagtcgaagacggtcagatcgttttcaaactcatattcatggtcctgcgcgtagtaaccaatctgcgcgttttcagaccatttcacggtaccgttatccggttgcagttcacccaccagggttttcagcatagtggatttacccacgccgttggcgccgaggatggcaatcttctcgcccacttccagcagcaggttgaagtttttgaacagcgggccttcatcgaagcctttggtgagggcttccacttccagcgcgttacggaacagcttcttgtcctgctcgaagcggatgaacgggttctgacggctggaggctttaacctcttccagcttgattttgtcgatctgacgggcacgcgacgttgcctggcgcgatttagaggcgttggcgctgaagcggctgacgaaggattgcaggtcagcaatctgcgctttcttcttggcgttgtcggccagcagacgctcgcgcgcctgggttgccgccgtcatgtactcatcgtagttgcccggataaacgcgcagctcgccgtagtccagatccgccatgtgggtacacaccatgttcaggaagtgacggtcgtgcgagatgatgatcatggtgctgtcgcgatcgttcagcgtctgctccagccagcggatggtgtcgatgtccaggttgttcgtcggttcgtcgagcagcaggatgtccgggttagagaacagcgcctgtgccagcagcacacgcagcttccagcctggcgcgacttcgctcatcgggccgtaatgctgttcaaccggaataccgacgcccagcagcagttcgcccgcacgcgcttccgcagagtagccgtccatttcgccgtattgcgtttccaggtcggccactttgtaaccgtcttcttcgctcatctcagcgagaccgtagatacgatcgcgctcctgcttcacttcccacagctccgcgtgccccatgatcacggtgtcgagcacggtgaactcttcgaaggcgaactgatcctgacgcagcttaccgatgcgctcgttagggtcgagcgacacgttaccgagcgttggctccaggtcaccgccgaggatcttcataaaggtggattttccgctaccgttggcaccaatcaggccgtaacggttgccgccgccaaatttgacggaaatgttttcgaacagcggcttactgccaaactgcatagtgacgttgctggtaactaacacggagagattcctgcgaaaagtgtgataaacgcggcattatgccacaattccgaattgagatcccctgttgcggtaatccactaaactttaacaaaatcgaaaaaaatgtgatttcgtacacatctgaattcccagttaacgggaatgcacatataatgcgctcccattaccgattcagacttatcaactcatcgccagaatggcttagatacctcgcataacatgaacatgaaattaacaacgctttttgcggcggcgttagccgtagtaggtttttgtaagaccgcgtctgcggtgacgtatcccctgccgacagacggaagccgtctggtgggtgaaaaccaggtggtgacggtgccggaagggaactctcagccgctggaatacttcgcggcgcagtatcagctcggtctgtcgaacatgctggaggcgaacccgggcgttgacccgtatctgccgaaagcgggtaccgtactcaacattccacagcagctgatcctgccggataccgtgcacgaaggtatcgtgattaacagcgccgaaatgcgtctgtattactacccgaaaggcaccaacaccgtgatcgtgctgcctatcggtatcggtcagctgggtaaagacactccgctgaactggaccaccaaagtggagcgtaagaaagcgggcccaacctggacgccgaccgccaaaatgcacgctgagtacattgctgccggcgaaccgctgccagccgttgtgcctgccggcccggataacccgatgggtctgtacgcgctgtacattggacgtctgtatgccattcacggtactaacgccaacttcggtatcggcctgcgcgtaagccacggctgcgtgcgtctgcgtaatgaagacatcaaattcctgttcgataacgtgccggtcggtacgcgcgtgcagttcattaacgaaccggtgaaagcgacgtcagagccggacggcagccgttacattgaagtgcataacccgctgtccaccagcgaagatcagatcaacaacaacgaaatcgtaccgattaagctgaccagcgcggtgcagtccgtcacctctcaggcggatgttgacacgaccatcgttgatcaggcgattcagaaccgttccggtatgccggtgcgtctgaactaatcgtgagaattaaaaaagcgggccgcggggcccgcttttttttatccgttattcacgataacgatgccgccatggtcatagcgatagtgacaatgggcgtactccagcggcgtaccatcttcaagatagatcacctgctctacctccagcaccgggtcggttggctcgcagacaaggtgttgcatatccagcgcactgggcttcagcgcccgcaccacccgatacgatcccatgatcttcagccccagcgtctcctgtacataccggaataccgaactttcaagatgggttttgttcagaccgggcaccagattgagcggcattaccgtagcgtccagagacatcggctcaccgttcagtaaacgcagacggataaagtcatagatcggcgtatccggatttatcatcagcgatgcctgctctttctcgttcgggaagcgcagttcgaagtgcaccacctgactcgtcaccgtgcctaaatgttcccaggttttggtcgccccgaagtagtcgctgccggagagatcccactgggaaagctggaggaaatttttgcggatgaacgtgccctgcccctgtcgggtatagaccagcccttctacgatcagctgacgcatcgcctgctgaatggtcatccggctggtgctgaactccgccgccagcgcgaactggtccggcagaggttcattggcggcgtactgctgggtgataatgcgtttcttaatttcccgcgctatggtgatgtacttcgccgccatcgtccttccttaaattagtgttctgtcccgctgtttttcaacgccactcgctcggcaactttgaggaaaggcaggtagaagaatacaccaaatacgatgattgccaactgcaccaccaccgcccgccagtcccccgccgtcgccagccaggcgctgaggatcggcggggtcgtccacgggatcatcaccacgcagcgcgacatgagccccagcgtggtacagagccacgcaaagtaaatcccgatagcgggcagcagcacaaacgggatcatcagcggcaggttaaagactatcggcaggccgaaaatcaccggctcgttgatgttaaatagacccggcgccagcgacagacgcgccacctgcttcgctgatttctgtcttgagaagatgaagatagcaatcagcaatgagattgtgctgcccgtcccgcccaccatgccaaaggtcggcacaaagatgttgttgatgatgtgcgggatcggctggccgttggcgaaggccagcatattctcattggtattgatcagcaggaacggctccagcaccacgctgttgaccaccgactgatgaataccgagcgtgaacaggaagttaccgaagctgtaaatgaagatcgtcccgggcaggctggtgttgatcagccgcagcggctgctgaataaatgtcgtaatgagatggatcagatccgtgtgcagcacgttcgccagtatagccgccagcaccgcaaacagggagagcgtgaggatcgtcgggatcagcgcggtaaaggatttgctcaccgctggcggtacgttctcccccagcgaaatgtgcagcgccttcagccgtgaaatggcgataaacagctcggttgagagcagcccaatcagcaccccggcgaaaatcccggtggagccgatattggcgaacgtcagcacctgggtaacgtttaccgtggcgtcgctgccgacgggggtaatctgtaagcgcatcggcatcatgatgatgaaactgctgacggcgataaccactgccgagaccggattgtcgaaatctttgttgcgcgccagcgaccaggcaatcatcggcgccagcagcagcgcggcgatgttcagcgtgccgttgatgatcgcctcgccccacaccttaaactgcgtgagcgtgtcgccctctaagatccagggaaacaccacgttgttcaccagcaccgccagaccggcaaggatgaaaatcggcattaccgtggcgaaggcatcgcgcagggatcgcaggtgcacctgatttgccaggcgcgccgagaactcaacaaatttatcgacaaaagactgcatgtgcggtgttatttttgtttcagacatagcggatagttcccatcaatcagtcacaaaaacggcccggcagcgtacggcttacatctcgcgtccgttggtatggattacctgttttaaccacgcatagctcttcttcggcacgcgcttcaggtctttcaggtcgtgattttcacggttgacgtataccacgccgtagcgcttgcgcatgtcaccctgggagctgagaatgtcaatcaacccccagccgagatagcccaatacctctgccccgtcctcgaacatcgcctctttcatagcctcgatatgcgcccggtggtagtcaatgcggtaggtatcctctatggggtttacgccatcccaggactcaatcaccccaatgccgttctcaatcgggaatactggcatccgccagtcgttggcatagcgggtgatgatggtgcgaaagcccagcggatcgatctgccagttccactcggtggccttcaggtatggattgtttttctcgccgtgcagcaggtaatagttcaccggcgtgccttccgggatggcatcgctgtccagcgttttgctggcgtagtagctgaaggccataaagtcgttcttcgtgcgcgcaaacagcgcgagatcgtctgcgcggtagatatcgccgaagccttcctgctccaccaccgccatcaccgccgggctgtagccctggcccgcgaagacgcgcagcaggttctggttgaggaattcgtcgtactgctgggcgcagaagatgtcacgcggtttgcaggtggccggataaatcagctggtgcgccagcatgccgcccatcagcttgcccggcttagtctggtgcaggtactcggtcagcgccatgtgcgccaccatggtgtgatgctgcacttcgtacagatcgcgcagggtttcctcccccttcatatagccggagatgcgaaaggctatcggcatgtggaaaatattctgctcgttaaaggtcagccagtacttcacccggtcaccgtagcagtcgatcatctttttgccgtagcggataaacgcctccaccacgcgacgatcgttaaatccgttgtactcctgcgccagcgccagcggcatatcgaagtggtagaggcagaccatcggctcgataccgcgggcgatcagatcgtcgataaaacggtcataaaacgcgatgccttcggcgttgaactcgccgtcaccctgcgggcagacgcggctccaggagatctggaagcggtagcagttcatgcccagatcctgcatcaggtcgaaatcttcccggtagcggtggtaggagtcggtggccactttccagtcagagatattttcaccggcttcgcgaatgtcatacaccgacatcccctttccgccctcattccaggccccttccgtctgcatgctcgacaccgagttgccccataagaagttggctggcagtgattgattcatggttgcctcctatatgactagtcatttaaatgatatgactagtcatatagccggagatgaaatttcgatcaaaggggaggaacgatttttgtgagatgggtttgaataatgacgagggatgtcttgcgaactgcgccctggcagcaagtcctattgctgccagacgtaaatgagtctgcgcaattcaggggaaagataccgaaccgccgaactccatatagatttttgccagattatttaactggttaaagcgattttcatacagtgccagttcggcctgacggcgtttctcctgagcatcaagccagaaagaaattcgcaccgcgccctggcgatagcgaacttcgtttaacctctctgattttttcgccagttccaggccttcacgtagaagcgtctcctgttccaggagttgatgacgcaaagcaagcgcatcttctatgctactcatcgccttgtaaagttcctgtttaaactccagaacccgttgctcgtagtcgttgcgggcaatcttcacgtccatgcccctttctctccattccaggaacggcagggtcaggtttgctccaacagagcctacaggattttccaggaaggcgataaggctgctgctgctggtgccaagcgagccggtcagactaaacgctggataaaatgcagtacgctggacatcaacggtggccaatgcttcccgtacccgccactctttagcgctgatatcgggtcgatgccgcagcacgttgaccgggatctttccactgacctgcggcagtggtcccattggtaacgctttcggttcgactatcgcgctgcccggcgcggttccaagcaaaacggcttgctgattgagcgcctgtaaacgttcattcttcaacgccgccagcctgttttcctgcgaaagcacgccctgctgagcatccacaacatccagagaggaggcaccgcccgcggcatagcgcgcgttagccaggcgcagcgtctcttttgcatagtcgatgctttgttgcaggacagacagctgctggttaataaagcctaagcgccagtaattattactggcatttgaaagcagcgtcaggcgtgcagaacgcagatcctcttccgaggcaaaacgtgcccacgccttcgcatcgcgctgccgcgctattttgccccacagatccagctcatagctggtattaatactggcaacgctgcccctgctccagtgggctgagctgttcagctgttttttaccgtcaagcgcgagcgaaccttttagtcccggatcgtttgtgatgccaatccgctcttcttccaggcgggcgcgataaacacgcaatactgctccagcgacatcgttattgcgcaccatcacctgccgcagccagccgtcgaggtctggatcgttaaaggcctgccagtcgaacggcatcctctcctccgcagcatccgcctgataccagttggcaggatatttcacctcaggaggctgatagtcgcttttcagagagtcggcgcagccagcactaagcaggacagcaaggcataccgttaaaggggataatattttcatgggttactcgctggccagtgaaacgaccggatccatccttgctgccttgcgggcagggagataaccaaagatcatgccgattaaagttgagcagaagaatgcggcagcagcggcctgccacgaataaatggcggtgaaaatgccccctgccagcgcggtgaacagcgctccggcggcatacgacagtgcaatacctaacactccgcctattagacataccagcacagcctcaatcataaactgctgcatgatatcgccctgacgcgcaccgaccgccattcgtacgccaatctcatgggtccgttccgtaaccgacactagcatgatattcatcaccccaatgctgccgatcatcagcgagatgcaggccaccatcagaatcaggatgctaaaggtcattgaggtccgttcgattgattgtcgaatctgctcgaaattataaagctggaagtctttcacgccgtggcgttgagtgagaagctgagaaatagcgctgaccgctgcctcgttggcaacatcatccttaagccttacgctgatgctggtcaacaccggttttcctgtcattcgatacatcaccgtgctgtaaggcatccagacgttaatgcgattaggcgcatagcttcggctgttccctttggcgatgccgacaacccgtgcaggcacggaacccagaaaaacgatttgcccaagtgccttgagtcccgcatcgtcaaataacgccttgcgggcgttttcatcaatgatgacttcctgcgaggcatttcgatcgtcctggaaagttgatccctgcaacagttcaataccgtttacgcgaaaatgatcgcgcccaacgccattgatcgtggcggtagcggatttacccagaaagcgaatgttgtcggaagcgttaacttcggggctgacgctgtcaacaaacccctgctttgctaatgcttcggcgtctgccgggaccagtgtacgaatggcttcagtgctgtcgtcaaagaaatcccttcccgggtagatgctcaccacgttggttccaagctccttgatattatcaagggttcgctgtttcgcgccttctcccagtgccaccaccgtaacaaccgcggcgataccaaaaataatgcccgtcatggttaacgtcgtgcgcaggcgatgcgcattcatcgcttttaacgccatgtgcagggattcacgggtacggtcaacaatactttgccaccagctttgctgaacgctgtcaggtcgtttaagggcaaccccggaggtaacacgactgccggtatcagaaataatttcaccgtcacgcagctcaataatacggttagcatgctgcgctaccttcatatcatgtgtcaccataaccacggtatggccacgctgattcagttcactgagtattgacagtacctcctgaccggactgcgtatccagcgcgccggtgggttcatccgccagaatgatttcaccgccgttaatcagcgagcgggcaatactcacacgctgctgctggccgcctgaaagctctcccggcttatgatgttcacgaccttccagcccgagtcttccaagcaatgtcgccgcgcgcagacggcgcttttcgcgctcactgttggcataaatcgccggaatttcaacgttacttaacgcgctcaggtcgggcattaaatgataacgctggaagataaaaccgatgtgctcacggcggatccttgccagatcgtcaggtgaaagctgggcggcattttgaccgctgataaagtaatcgccacaatcagggacatcgagacagcccataatattcatcagggttgacttaccggaaccggaggcgccgatgatcgcgaccatctccccagcagcgatagtcaaatcaatccctttaagcacggtgagatcctgtccaccgttcctgtaggtgcggctgatgtccttgagttctatgatattactcaagatacaaacccttccccgggcgctttttcacccggctgcgataacacaacatgttccccgacttttacaccgtccaggatctggatatccacactgttagtaatgccggttttgacctcacgggtttccagccggttatcactggtcaatatctgcacctgctgtttgttgccactcaccttgtgcacagcctgaatcggcaccagtaacgtatttttagcttctccagccagcaaggtcacctgtgctgtcatggcaattcgcagccgattttctggattggggacatccagcagcgcgttgtagtacaccgaagcatttgacgtgcctgaccctgaggctgagctactgctggcaaggctatcatctttcataaccgactcaggtgccagttcaacggtacgtaacgtggcgtcataatgcttatccggctcagagaaaatggtgaatctggctttctgtcccggtgaaattcgcgtgatatccgcctcagagatctgggctttaattgtcatcacgtccagacgtgcgagtttgataatggtcggcgcactttggctggagttaaccgtttggccctgttgggtgacaacggcaataacaatgccgtccatgggagcaacaacttttgtataacccaaatcgacctttttcttgtcgacatcaatttgcgcctggacgagtttggcattcagtgccgatagctcagcgcgggtactggccagcgtggtttcagccgtttcgaaatcttctctcgagctggcatcctcatttaacatctggcgctggcgcttaaaacgcaatgaggcttgcttcaactgcgcctgcttagcctgaaggtccgcttttaccacgttgagagcagcttctgcgttgcgtaaatcattccgctgcggcacgtcatcaatttcagcgatgagctgtcctttagtgacacgatcgcctaacttcactttcagcgacttaacctggccagaaacctgtgccccaacgttgacccgctcaatcgcatcaattcgaccggtagcaagtacggcgttttcaatatcgccgatgcgtactggagcggtaacatactcaggaacctcggggcttctcaggaagaagaacaaggcgatgctaaaaataattagcagagccgcagcacaggtcattacgcgtcggggagggaattttgttaacattacgcaggttttccataacgataaacagcagtgaatcaggcatcatagtaacatcgccagtatttacgggaggtaaacccgcgctatttggtgaagtagcgtcatcgtagacccccgccatcaattacacagaatcaccaggtccgcctgtaaaccgccgcaagcgtgggattttgtgcctaaatccacagagtccccttttgctgagccccacctgcgatttttcccataatcgattcattgtgcattaagtgcttaattatagttgcaactcacatatgataatagtaattattatcattagcatttgcactgatggtttatctggcaaggtatacagaggtatcaggaaacaagcctctccaggtttgttgaacggtctcacactcaacaaatgcatctgaacaccgcggcgtggcagcacgacgccgcctgggctgttcaaaaggacaacggcgcgtaagcgttaatggaagccgggacaaggaattcccgattcaccagcctacgtcacggaatagtcagcgacaggaccgttcgtaaggctgatgaaactcaaaaaggacgcagcgtctgtcaaagcaggcttaacgaaaattaacgtcctgctgctggcatatgactgcgtcgacttcctgatttagttcgtcaagcggagagggattttctcatgcgtattttgtttgtaggcccgcctctctatgggctgctgtatcctgtgctgtctctggcacaggcgtttcgcgttaacggccatgaagtgctgatcgccagcggaggaaaattcgcccaaaaagcggcagaagcagggctggtggtatttgacgccgcacccggttttgattctgaagctgactatcgccgccgcgaggcacagcgaaaagaaagcaacatcggcacaaaaatgggcaacttctcattcttcagcgaagagatggccgaccacctggtggactttgccggacactggcggcccgatctcatcatctacccgccgctcggcgtcatcgggcctctgattgccgccaaatacgatataccggtcgtaatgcaaaccgtcggcttcggccatacgccctggcatatcaaaggcgtaacgcgttcgctcgcggacgcctatcatcgccacggcgttggggccgcaccgcgcgatatggcctggatcgacgtaacaccaccgagcatgagcattcttgaaaacgacggagaacccattattcccatgcagtacgtcccgtacaacggcggcgcggtgtgggaaccgtggtgggagaggacgcccgaccgtaaacgtctgctggtgagtctcggtaccgtcaaaccgatggtcgacggccttgacctgatcgcctgggtgatggattccgccagtgaagtcgatgccgagatcatcctgcatctttcggccaatgcgcggtcggatctgcgctcactgccctcaaatgttcgcctggtcgactggatacccatgggagccttcctgaacggcgcagatggcttcattcatcatggtggcgcgggcaataccctgacggcgctgcacgccggtattccacagatcgtcttcggccagggtgccgatcgcccggtaaatgcccgcgctgttgtcgaacgcggctgcgggatcatccccggcgacgacggcctgtcgagcagcatgatcaatgctttcctcgacaatcgcgcgcttcgcgacgcctctgaagaggtagcggcggaaatggcagcgcaaccctgtccgagcgaggtggcgaaaagcctgatcgcgagggtacagaaagggtagccactacgccgtcatgacgatcatacgccagcacgcatccaggagatacgcccgtaacaatgcgggaccggatcgggctggcgcttttttttgcacagcgatccgacttggatcctattgtttacagacggaggaggcttaatgcctgcgactcactctcccactcctgcgcggtcctggatagttcgcctggcacgcgtgtgctgggaacgtaagaaacttagcatcatcgtagtggtagcgtcggtctcgaccattctgctggccgcgctgacgccgttgctgacaaggcaagcggtgaacgacgcgctggcgggcaatccgactcgtctgccgtggctggcctgcgggctattgctgattgccttttttgatttcatcggtaactacgtgcgccgcggttatgccggggagctctcgctctgggtgcagcacaccctgcgaggacgggcattcgacagtattcaaaaacttgacggcgcaggccaggacgcactgcgcaccgggcaggtgatttcacggaccaacagcgatctgcagcaggtgcataccctgctacagatgtgtccggtgccgctggcggtgttcacttattacattgccggcattgccgtgatgctgtggatgtcacccgccatgacgctcatcgtcgtgtgcgtactggcatgcctggctatcactgcgctgcgcgcgcgtcgccgggtcttcgcgcaaaccgggctggcctcggaccgactggcaaatctcaccgaacatatgcgcgaggtgctggcgcagatctcagtggtaaaatcctgcgtggcggagctgcgtgaaacgcgctggctggatcgccagtcgcggcagatggtgcgggtacgcatcggcgcggccatctcgcaggcgataccaggtgccaccatgctggcgctaccggtgctcgggcaaatcgtcctgctgtgctacggcggctggtcggttatgcacgggcgcatcgatctcggcaccttcgtggcgtttgccagcttcctcgcgatgctgaccgggccaacccgtgtactggcatcgtttctggttatcgcccagcgcacccaggcgtccgtggagcgcgtgtttgctctgatcgacacccgttcgcagatggaagacgggacggaggcggttaacggtcaggttatcgggctgcaactggagaatatgagcttcgagtaccgtggcggcagacgcatcctcagcgatgtctccttttccctgcacgccggtgaaacggtggcggtagtgggcgcatcgggttccgggaaatccacgctgctgatgctgctggcgcgtttttacgatcccagcgccggagagatatggctcaacaccagcgcaggccgacagaacctccgcgatctcaggctggaggcgcttcgtcgtcgggtaggcgttgtgtttgaggatgcttttctgtttgccggtacggtggcggaaaatatcgcctacgggcaccctcaggcaacggcggacgacattcgcctcgcggcgagggcagcaggagccagcgattttatcaacgccctgccgaaaggcttcgatacccaattaaccgaacgcggtacgaatctttccggcggacagaggcagcgaatcgcgctggcacgggcgctcattaccgcgccggaagtgttgatcctcgatgacaccacctcggcggtcgatgccggtactgaagcggagatcaacaccgcgctgagtcgctatgctgacgaaaagcatatgctgctggtgattgcccgacgccgttcgacgcttcagttagccagccggattgtggtgctggataagggccgggtggtggacaccggaacccaggcagaacttgaagcgcgctgtccggcgttccgcgcgctgatgaccggtgacggcgatttcctcgcgccttcccacagtgggcctaacggattgtggccgaccgtaccagcggcacaagacgatgcggcgcagacgggggataaaggctttgtcgcccgtatgacgcgcgtgccggaaaatgcagtacagcaggcgctggccggtaaaggccgcaaagtcacgtcgctgctgaagcccgtggcgtggatgttcgtcatcgccgccctgctgatcgccctcgattcggcggcaggcgtcggggtacttatactgctgcagcgcggcattgactccggcgttgccacaggcgatatgtcgactatcggcctctgtgccctattcgccctgtgcctggtggccgtgagctggtgttgttattcactacagactgtcttcgccgccagagcggcagagtcagtccagcatacggtgcgcttgcgcagcttcggccatatgctgcgtcttggtctcccctggcatgaaaagcatgtcgattcgcgtctgacccgcatgaccgtagatgtggactctctcgcccgctttctgcaaaacggccttgccggtgcagccaccagcctggtgacaatgttcgccatcgccgccgccatgttctggctcgacccgctcctggcgctgacggcattaagcgcggtgccagtggtcgcactggcaacctggatttatcgccgcctcagctcccctgcttatgcgcaggcgcggctggaaataggcaaagtcaacagcaccctgcaggagaaagtctccggcttgcgcgttgtgcaatcgcatggccagcaggaacaggaagccgcccggctgcgcgcgttatcggatcggttccgtgcgacccgcgtacgtgcgcaaaaataccttgccgtctatttcccgttcctgaccttctgcaccgaggcctcctatgccgccgttcttctggtgggtgcatcgcgagtcgccgaaggcgaaatgaccgccggggtgctggcggctttcttcctgctgctggggcaattctatgggccagtgcagcagttatcaggaattgtcgacgcctggcagcaggcgacggccagcggcaaacatattaatgaactgctggcgaccgaaggcacagagaacatcgagccctcttccgcaccgcccgccaccggcgcgctgcatcttgatgaggtcacgttcagttatcccgacagccctgaacccgcgctgaacaaacttaccctgacaatccctgagggaagggtcgtcgcggtcgttggtcgcagcggtgcgggtaagtcaacgctgattaagctgatcgccggattgtattcccccacccacggcaggatcagcattggcgatcggataattgatgatgcctcgcttgccgattaccgtcgccagattgggctggtcgatcaggatgtggcgttgtttagtggtgatatcgcggaaaacattcgttattcacggccatccagtaccaatgacgacgttgagattgcctctcaacaagcagggctgtatgagacggtgcgcaatctgccgcagggattccgcacaccggtgaataacggcggtgccgatctgtccgcaggtcagcgccagctgattgcgctggcccgcgcacaactggcgaatgctcacatcctgctgctcgatgaagccacgtcacgcctggatcgcacatccgaagagcgattgatgtcatcgttaacagacgtcgcgcacgccgggaagcacctggcgctgattgtggcgcaccgtctgaccaccgcgcagcgctgcgatctgattgccgttatcgataaggggcagcttgcggaatacggcacccacgaacagctgttagcggccggcggcctctacacccgcttgtggcatgacagcgtcggcagctctgttccccatcgccagcacgacatcacgggggaaatcgtggaagagtaattgcgcacgtaagacattacaaaacacgcgctaaagcggctgttcccggaatagccgctttagctatttatactgacacccttcatattcaaagagagtgaatgctgaacatgcaacaacatccctctgctatcgccaggctgcgcagccagctggcagcaggccacattgctaacctttctgacttctggcgagacgctgagtcgctaaatgtaccgctggtgacgccagtcgacggagcgaaagacgagcgtgatgtgacatttctgtggcgcgccaggcaccctctacagggcgtttatctgcgtctgaatcgggtgacggataaagagcacgtggcgaaagggatgatgaccgcccttcccgcgacggatatctggactctgacactgcgtttacccgcaagctactgcggctcctattcgctggtggaaatcccccccggcaccccggccgagacgattgcacagtccggaggccgctttgctaccctcgtcgggcacgtcgatccgctaaacaaaacgccggggatcaacgttcggggaagcacacaggagtcggtgctggcgcttgataaagcccccgcccagtccgaatggcgcggcgggtcacccagcgggcaattgcttacctcggcgcgcactctcgccggggaatcgcgccgggttcggctctatctgccggacgttgatgtttcgcagcccctcggcctggtggtactgcccgatggtgaaacctggttcgatcaccttggcgtatgcgcggcaattgacgccgccataaacaacggacgcatcgtgcctgtggctgtacttggcatcgacaatatcgatgaacacgagcgaactgcgatactcggcgggcgcagcgagctgataaaggatatcgccgaccagttgttgccgacgatccgcgccgaacacccgcagcggcggtgggcagaccgttcgcgcaccgtgctggccggacagagcctcggcggggtcagcgcgctcatggccgctcgttacgcaccggaaacgttcgggctggcgctcagccactccccttcgatgtggtggacgccagagggtgccagccggccaaacgtgttcagcgaaaccgatacgtcatgggtgagcgaacatctgctttctgccccgccgcagggcgtgcgcatccgcctgtgcgtgggatcgctggaaggttcgacggtaccccacgttcagcggctgcatcagcagttgcttaccgctggcgtcgacagccattgcgcaatgtataccgggggtcacgattacgcatggtggcgcggcgcactgattgacgggcttggtttactccagggttgacttgacccgcgaacactttcaggcaactgtacaggcttcctgaataaagaaaatgtcacctgcggaaaaggaataaacatcagatgtatgcccgcgagtatcgcccaacacgctcacgcaaggcgcttgtcactcttctttctggtctcacccttatctggaatgcgcacgctttcgcaaagccggatatgcagccactggggccgaatatcgccgataaaggctctgcgttttaccatttcagcgtcaactcgttcgactccgccgatggcagccgccattatcgggtatggacggccgtgccaaataaagccgcaccggcgtcgggctacccgattttatatatgctcgacggcaacgcagttatggaccgcctgaacgacgacctgctcaaacagctggcagaaaaatcaccgccggtgattgtggctgtcgggtatcagaccaacctccccttcgatctcaacggcagggcctacgactatacgccagcagcagaaagcggcaaaacggatacccgcagccgtaagagtgggggtagcaacgacttccgccagttactggaaacgcgtatagcgccaaaggtggaacagggattgaatatcgatcggcagcgtcgcggcctgtgggggcactcctacggcggcctgttcgtgctggatgcatggctgtcttccccttatttccggacgtattacagcgccagcccgtcgttgggcagaggccatgatgcgctactgagccgcatcacggcggttgagccgtcgcaatactgcgccaggcgcctgatgataatggaaggttcggcgacgccgggcgataaccgggaaacgcatgctgccggagtgctgacgaaaattcatgccaccctcgccacgctggaagataaaggcgtcaatgccgccttttgggatttcccaaacctgggacacgggccgatgttcaacgcctccttccgcggagcgctgttagatatcagtggtgaaaacgcaggtaacacagcaggctgtcattcattaagccgctaaacactgcccgccttgacgcgggcagtacgcctctggcactacgatcagaatgacgcggttacaccggcataataagcccgaccaggctcgttataggtattcgccccttcggaagatcggtaaatctgtttatctaagatattgctgacaccaacgttaagacgcagatttttattaatatcgtaattgaagttcgtccccaccagcgaataagcgcccagctctttacctgacagaccgccagtatcttcactacgagtttccgaatgagtacgcggtttttgtctgccgtataacgtccagttgacgctggcagagaacgcctgggtgatggtccagtcaagcgagttattaatggtgtatttcgggatgatcgacagcggattaccggtgtctttttgctccgaggtgatcatccaggtggcattggtattccagttcagacgatctttcaccagcgggaacgccatgctggcttcgataccgtccaccagcgctttcccgccgttctgccactggagaatatatgcgccggaagcggtttgcccgataacattatcgccggccacgatcttattctggtagtcattgcggaagtaggtcacgctggcatggtaatcttcccaggcgaactccagcccaatttctttattgatgctaatttccggatcgagatctttattaccgatcaggtagcagccgcccgatgtaatatcttttggacaaccgttgcctttcgagtagagcagataaccttcgctggattgatacaggtttggtgctttaaaggttcgggcaatccccgctttgactttgaagtaatcccccaattcctgcgagaggttcaggctggggctgaagttaccgccggactcgttgagataatcaaagcgcaggccgggaatgatattcgtgccgggaaccggctcaatattatcttcaatatacagcgcactgatttgggaatggtttttactgctgcgatccgcagccgagccagaaatgccgccgatatcactgtcatccacggtcaggctggtagaggaaggatcgtcgagctcatcgcggctccactccgcacccacggtcagcgtttgatcgaccagcgcattcagcggaatattaagctcgccgctggttcgccaggagctcaggcgattggtcgtgaacttttcatccgccgaaatacgcccttcaccgccaccggataatccttcattcatgcgggtgttattggttttctcgtaatagacaccaaaacggctttgaccccagtcccagataccattgtgcgtaacgccataattctgccggtacaggcggttcgtctcctcgccggatttcgccaggctttcagtgacggcactggaagaactgttttgcgtatcgcccgcatagatattcccctggcggctatatccggcttcgaaatcgataatttgctgcggatttaatttccacgagacaacgccgttaatatctttgttgcgcaccccttcatgcccggccgcgtttttcgtaccggccgaggagttaatatcccagctgtcggcatcggttttattcaggtttccgtacaggcgcatggtcagcgcatcgccagccagcggcccgctaaggctgaagttggcgcgacgcgtagcgccttcgtcgctgctttccggctggttggtgtataacgacagcgaaccgtgccagtcgttggtagggcgtttggtaatgatgttcaccaccccgcccgctgcgcccgaaccgtagcgtgccgccgcagggccgcggatcacttcaatacgctcaacctgttccggtggcacccagttggtgtcgccgcgggtatcacgctctccacgccagctataacgcacggcgttgcgcgacgtcaccggcacaccatcaattaaaattaaggtgttctccggccccatgccgcgaatgtcgatctggcggttattaccacgtgtacccgaggcgctgttgccggtcagattgacaccgggcattttgcgaataatatcggagagatcgttgaccggagggttctttttaatatcttcgctggtaataatcgacacgcccggctgctgtttgagtacctgctcagcggtggcttccaccaccagggtctcgtcgttatcatcggaggattttgccagtgatacctgactgttcaaccctgccaggagcgcagtgagcggccagaagatcttgataattctcatacccattccctaatacatgcctaacgtaaaagtgatcgatcgttaagctcacatccttgccagatattttaaactgccattatttttataataagaatgataattaatatcatttgcagaggattaaggcaatccttaatacacggatgcgcgcattaatgaaacgcacgcattggcccggagtgattcttcccgggtaccgccctgtgcgttcgtaaagctggcatactgaaacagcggaagaagagaacagcccattggtatttcgtgtagtgacataacgttaatatgtcattacaagggaacgcagccccggtaagcgcaagcgccaccggggaaagaaaggttattgttgcgctaactgattgcgacggtactcgccctggcgctccagcatccagccaggatactcgcgcggcagcgcgctgaccgcatccagctgtttcagctcatcatcgctcagctgaatgccggttgcggcaatgttgtcatccaactgatcgacccgtttcgccccgatgatgacgctggtcaccgccttctggtgcagcagccacgccagcgcgatttgcgccacggaaacgcctttactttcagcgatggtacgcatcacgtccacgcagtcgaaggcgcgatctttattcactggcgggaagtcgaacgccaggcgacgactaccggccgcgctctgcccgtcgcgatcgtattttccgctcagcagaccacccgccagcgggctccataccatcaacccgacgccttcgctctgcatcatcggcaccagttcgcgctcaaggtcgcgcccggcgatggtgtagtacgcctgcaatgaggcaaaacgcgccagccccagacgctcagagatgccgagcgctttggcaatctgccatgccgcccagttcgagacgccgatatagcgtacgtgaccgtgctgcacaagattatccagcgcgtaaagcgtctcctcgatgggggtcgcagggtcgaaaccgtgtagctgatacagatcgatatgatccagctgcaagcgacgcaggctctccttcacgccgctgatgatgtgatagcgcgagctaccgcgcgagttcacccccgctgtgccggtttcaccgaacaccttggtggcaacgaccacgttttcgcgcggaattttcaggttcttcagcgcctgcccggtgatctcctctgaacgcccttccgagtagacatctgccgtgtcgataaaattgatcccggcgtccagcgcgcggcccaccagctgctcggcgtcgctttgctgaagctgaccaattttgccccacatgccgccttcaccgccgaaggtcatggtgccgaggcagagttcagaaacaaacagtccggtattgcccagtttttgataacgcataacgctttcctcgcatgtcgattgggtgtctgttagttatacccgccccccagccatcgcgaatgtggcgttcctgtccgtttcttgcccaatcctctgaatctatccgcgcggggcgtcgccaaagacgctgtagtctggcagccgcacctgctggtacggctcccagccgccgccgagggctttgtagagcgccaccaggtcaagcgcgctctgcacctgcgcctgcgcccgctgctgttcggcctgagcgagctgacgctgggcgtccagcacgtcaataaagctggcgatcccctgccggtagctgtcgctggcgagatcaaaggcgttttgcagcgcgtcgatggttttcgccaggcccgcttcacgctgctggtcggtgcgatagctcaccagcgcgttttcaacgtcgccgagcgccgtcagtaccgtctggcgatagtccagcactgccgccccctgctgcgcgcgcgccaccttgacgctggagaccagccgaccgccctggaaaatcggtatggaaacctgcgggccaaagctgtagaagtggctgctccagtcggtcagccagttagattcactgttgcgcaggccaaactgtccggagagggtaaagctcgggaacagctctgccaccgagacgccaatctgcgccgtggcggcatggagattcgcctcggcttcgcgcacgtccgggcggcggcgggccagcgtcgacggaataccggtctgcacaatatccggcagcgcgggtatcggctgcacggattgcagttcggcatccagcgcgcccggcggcttaccaaggaggatcgccagcccgttcatcgcctggcgttcctgcgcctgatactgcggcagctgcgcttcaagattgcccagctgcgcccgggcattttccacgtccatctgcggcgacagcccgccccgctggcggctttcggtcagatccagcgtctgctgtgcgctttcaatttgcgtattaagcgtggcaatgatgctctgcgccccacgcagctgtagccacgcccgcgccacttcggcttccagcgagaccagcgcatcgttacgctgctcgatcgccgcccgctgctgcgcctcagccgcttctacctgacggcgcaccttgccccacaggtcgatttcccactgggcgtcgaagctgccctgatagaggtttatcggctgcgtcagcgggcctaacgcgccccgcagttcaggatcgacattattcaactggtcatacacgccgtgggatttcagctccccttccagcccaagctgctggcgcgtcgcctgcacattgccattcaccgacgggaaaaacgccccgccggcctggttaatctgttcgcgcgcgccggcaatgcgtaataccgtttgctgtagcgtcagattcccggcgatggcgcgttcaatcaggctgtcgagctgcggcgagccgaaggttttccaccagcgcgggttagtggccgcggaggaagtttgcgatttcaccgcgctgtcgcccttatcgttccagtgcgtggtggcgggcggtgcaggctgttggtagttcggcccgacggcgcagcccaccagcagcatcattatcatcagggggtgtaaacgtctgtgtatcatcagtgtgctcctgcactcccctcgctcttaaccggcgagagcaacaaacaaaacggaatcagtaatagggccaccgcgctcagaatggtgaagacgtcgatgtaggccagaaagcgcgactgctcgatcatcgtctggtacatccgcccggtggcaatgccggtcggatcgcccacctgagtggtgaagttctggatcgcctgggcgctttcgcgaatcgccagctggaactgctcgttaaacggcgaagcgtggtaagccagatgcgcgctgtgcgcctgcgagcgctcggtgatcgccgccgtcgagagagaaatcccaatcgagccggccacgttgcggaacatggtaaacagcgccgccgcgtcggcgttaagccgcctcgggatcgagataaaggcgatggtggtcagcggcacaaacaggaaccccagccctatcgactgcgcgctgcggaacagcaccagcgtttcgaagtcgatatccggcgtcagcgtgcgggaccagaagaacgacaccgccaggcaggtaaagccgaaggcgatgatccagcgcgtctgcaccaccggcatcagcttcagcaccagcggaatggtcagcacaatcagcaccgcgccgggcgagagcaccagcccggaccaggtggcggtatagcccaaatcctgctgcgccagctgcggaataaccaccgaactgccgtacaggatcatcgccatccccgccatcagcaggctggagatcgcaaagttgcggtccttcatacagtgcagatccaccaccggctttctggcatacatcagccagtagatcgcgccgataatgccgaccagcgtcagtactgcgaaggtgcggataaagttcgaatagaaccagtcatcatcttcgccccggtcgagcatcacctgcaaacagccaagaccgagggcgatcaggccgatccccgtccagtcgacggtgagcttctcttccgactttttctcccacggcggatcttccagcagctgatagatggccagcaccgtcacaatccctaccgggatattgataaagaacacccagcgccaggagtagttatcggtgatccagccccccagcgtgggaccgagtaccggcgcgacgataatggcaatggatgaaaggccaaaggctttgcccctgtcctccggcttgaagtagtcgagtagcaccgactgctgggtaggctgcaacccgccgccaaagaacccctgcatcacgcggaacaggatgatttgccatagctcggtggcgatgccgcacaggaacgagcagatggtgaacatcacaatgcagatcaggaagaactgcttgcgaccaaacaggcggctcagaaaggccgaaatcggcagcacgatgccgttcgccaccaggtagctggtgagcacccaggtggattcgtcatagctggccgagagcgaccccgcgacgtggggcaacgccacgttgacgatggtggtgtccagaatttccataaacaccgccagggtgaccacaatcgccaccgcccacgggttactggcgggcttccagttatcgtggctgtgatccgtcattccacggtgaccttcggttcaaccgacagccccagcggcagcggcttgttcggatccagccctttatcaatgacgattttcaccggcacgcgctgaacgatcttcacaaagttaccggtggcgttttccgacgggaaggcggagaagcgcgagccgctgccctgctggatgctgtcgatatggccttccagctccatatccggccaggcatcgacggacacggtcactttgtcgcccggcttcatgcgctcaagctgcgactccttgaagttcgccaccacccacacgttcggggaaaccagcgagaacagcgccgtacctgcctgcaccagcgtaccgggctggacgttgcgtttggtgacaaaaccgtcgaacggggcgcggacttcggtataagagaggttcaggttggcggtttccagctgcgctctggcctgatcgacctgccgttcgcgggcttcgacgttggtctcctgctggcggatttgcagctgaacctgctccgccacttccagttgcgcctgcgcgctggccagacccgcctgggcactcctcagttgagcgttcgcggcatcgatactttgttgcgtggtcgcgcgcgggtcaacgccgcgctgacggcggtactccgcctgcgcgttggccatatccgcctgggctttcagtacctgggctttggcttcatcgcgctgagcgggatattgcaccttcgagagcgccagctgcgcctgcgcctgatgcaactgcgcaaccgccagcccaagctgagcctgggcctgatcgcgctgggcggtggtatcacgcggatcgatcaccaccagcacatcccctttcttcacgcgctggttatcccgcacgcgaagttcggtgacgtagcctgccgtttttggggcaatggtcactacgtcgccgtcggtgaaggcgtcgtcggtggtctcttcgttacgggttaaaaaccaccagaccagcgccacaatcaccatcacgatgaccacgatgccaaggataattaacggttttttccccgggcgcttgcgctcgttattgttttgatcctgctcgtcagcaggtgggttttgatcttctgccatagttcagcaacggtcctgtcagtgagcggcatcacactatgccgttcactaaagctaggacgttgctatacatttgccaggaaaaactgacaaattgcgcactatatgagaaggaatagtccgaaaccgaccgccgttgaccagagcagcatcgggattgaccataaatggaagcgccaccagatgcggcgatcgttggccatccgcagggcgatgaggttagccagcgagccaggcagcagcccaaagccgccgacgttgaccgcccacgccagcagtaccgttgggggaacatagttaagcagcaaaatggtggacggcacgttactgatcacctgcgagagaccaatcgccgtcagccataatcccggctgcgacagaccgctgacgctatggagaacgttctgcaataccggaagctggatcagcagatggacgtcaataaacatcgccataaacaccagcagcagcgtccagtcaacgctcaccagcacccgccgggcgaggaacaggaagccgcacgccaccagcagcgcgcccgccagcgcctggtttaactccagcgcgataaggaaaacgatatacagccccaggcagctccagacgagacgcggctgccaatgggggccggttgtaccgctgtggtactgcaacgatttattcgggaaagcaaaccagcccaccgccagcagcgacgccacgatcgccagcgccagcggcgccatctgcccggtaaacgcggtaaacgacaggccggagcgtccccacagcagaatgttctgcgggttaccgatcggcgtgagcagcgagcccgcattgacggccagcgcttcaaagataatcagacgggtaaccggtatttcgcacagcttacgcagcgtgagcgtaagcggcaccacgataaaaagcgccacgtcattagtgagaaacgtcgacaacagcgccgccgaaaagaccatgaacagggccagtttgcgctcggtggcgaagcggcgcaccattttgcgccccagcacgtcaaaatagccgctcagctccacgcctttggtgagcatcatcaaaccgctcagagtaataatggtgcgccagtctatggccgccggccaggtgtgcggcgtgaagggcacaaagacgctgagcccaacgccagtgatcagtaaaagatggaaaaagcgatcgcgtttcagggcctgcaagccggggatgttcattcagcggagggaccgtatttgagcgtaaactcgcggaacttcaacagcgtctcctcgctgacgtggtgttccataccttcggcatcccgacgggcaatttccgggctgacgcccagcaccagtaaaaaattctcgacgatctggtgtcgctcgcggctctcctgcgccagcttctcgccctcagcggtgagaaacaccccgcgccaggggatcatttcgatcagcccgaccgacgccagacgttttaacattttggcaacggttggctgcgacacccccaggcgtgcggccatatccacctggcgcgcttctccaacctcacggatcagatcagagatcagttcgacataatcatcaatcagctcccggcggtgcgcctcacgcacctggcggaagccttccacatgctcttcaacgttcaccagttgcgtcgttttttttgttgttggcttacctgcgcgacggttcattgtgcttcctcaatggggttgacgcttccagcgccctgtaacggagcgcacattgtaaaccatagctctacaagcacaaaaaattaacgaattagccatagctatacaatatagcctgtgctatatctgtatgtaatgcagtcacccttcacggatcgaagggatcatgaatcaggaggtcttatgaatgaattcaagaggtgtatgaacgtgtttacccactctccttttaaagtgcgcctgatgctgttgaacatgctgtgcgatatgtttaacgccaaaccgcagcaggacgacaattcttcccactaagcggcgtcgcggtacgccgcttcattttcccgtcacacttacgttgtaaactggcctgttcccgattatttttgcggatttgcagcccccttcgcaaaacatctgtttagcaactgttgaccttaattcacgctcgcactatcttcttgcagccctgcacaatttgcggctcgctgaagcggacctctcattccctttccacgcactgtccggcaggctttgacccttgacgccagggtgagcacatggcgttttcgtgatagtgatctatgaacgtaaccctgattgatacacttgttacccgcagccgggccttaagcccgtggacgggattctattttttgcaatcgctgttgattaactttgctcttggctacccctttagcctgctttatgccgtcgggttcacctgtattcttcacctgctctggcgaagcgcaccgcgcgtgcagaaggtgcttatcgggatctgttctctgattgctgccgcctatttcccgtttggccaggcctatggcgcgccgaactttaatactctgctggcgctccactccaccaatatggaagagtccacagagatcctgacgatctttccgtggtacaactacgtggttggccttttcatttttgccctcggcgtgattgcggttcgtcgtaagcccgtcgggaaaaaggcatggggtaaaattgaaagcctgtgcctggcctttagcgtggtgacgttttttgttgcaccggtacaaaatctggcctggggcggcgtgtttaagcttaaagataccgggtatccggtgtttcgcttcgtcaaagacgtggtggtgaataacgaggaagtgctcgacgagcaggcgcgtatggccgagctttccaccatgaaagacacctggaatgtgctggcggtgaaaccgaagtatcacacctacgtggtggtgatcggggaaagcgcgcgtcgcgatgcgctcggcgcgtttggcggtcactgggataacacgccgtttgccagctccgttaacggtacgctgtttaccgactacgtggcggccagcggctcgacgcagaaatcactcggtctgacgctcaaccgcgtggtggatggaaaaccgcagtttcaggataattttgtcaccctggccaaccgggcaggttttcagacatggtggttctctaaccagggacagatcggcgagtatgataccgccatcgccagcatcgcgaagcgtgccgacgaggtacagttcctgaaaagcggtgatttcgaagccgataaaaacacaaaagatgaagcgttgctaaaaatgacggcgcaggtctttgctactcagcgcacccagccgcagctgattgtcctgcacctgatggggtcacacccgcaggcatgcgatcgtaccgggggaaaatatgcggagtttgttcaatccaaagagacctcgtgttatctctacaccatgacgcaaaccgacgatctgctcagcaagctgtacgcacagctgcgcaacagcggcgacagcttctcgatggtctatttctctgaccacggtctgacatttaaggagcgcggtaaacaggtgcagtatctggcacacgatgacaagttccagcaaaacttccaggtaccgtttatggtgctgtcgagtgatgacaaaacgcatcgcatcatcaaagcgcgccgttccgcgaacgatttcctgaaattcttctcacaatggacggggattaaggcgaaagagataaaaaatgattacccgtttatctccgggaagaagggcccgccagtttacattaccaactttaagttacagaaagtcgactatacccatcttgggacggatattttcgatattaagagtaagtaatttctgccgtttcgtgcgggctgaannnnnnnnnnnnnnnnnnnnnnnnnnnnnnnnnnnnnnnnnnnnnnnnnnnnnnnnnnnnnnnnnnnnnnnnnnnnnnnnnnnnnnnnnnnnnnnnnnnnnnnnnnnnnnnnnnnnnnnnnnnnnnnnnnnnnnnnnnnnnnnnnnnnnnnnnnnnnnnnnnnnnnnnnnnnnnnnnnnnnnnnnnnnnnnnnnnnnnnnnnnnnnnnnnnnnnnnnnnnnnnnnnnnnnnnnnnnnnnnnnnnnnnnnnnnnnnnnnnnnnnnnnnnnnnnnnnnnnnnnnnnnnnnnnnnnnnnnnnnnnnnnnnnnnnnnnnnnnnnnnnnnnnnnnnnnnnnnnnnnnnnnnnnagggtacaaacaaaaaaaatccgccacattgggcggattttttactggctcaccgaagtgattagaagcggtaacctacgcccgcgatccaggtgccaacgtcaacgttgcggatacggctctgctcataggagaagtccagagcaacgttttcgattgggttgaactgcatacctgcgccataggagaaaccatagtcgctgttgcttgcagtacggttcagaccctggttttcggtctgctggaatttaccgtagccaacacctacaacaccgtagatgcttgcccagtcattcaggcggtaagcaggacccgcggtgatgccgtagtactgacctttattgtaagagccattttcagtacgatctttctcggtgtaagtgaaagaaccgatcacacccagcgggttgttgtcttgctcgtaacggtacttcaggttgaaaccgttggttttgttcatcacgccctgcatatcgctctgagcgtaaccaccggttacagtagaagttgccgctacagcggtacctgcggaaacagccagaacagctgccagtgctgaaagacatgcaatttttttcataaccacctcaaatgtgcttcaagtaagtccgtaagttttaaatatatcaaaaaattctgtgaaactctttgtcattcacgatgtctaatgcgacctttcctgtaacagaacatttccagcaccagctatctcgttcaaataactccagattttcacctgtaaatgctaatagtgcgcgtcatcgccatttagttcatccagattattcctaatctttcaggcgataaaatcatcaacgttttctcattttacggattttccctggatttttttcaacagtagctcaaccgttgcagcttatttccattacactgcgacttttacctcatttgacataaattgacaggagaaaggatgccaggtttacctcgtaaatcgtcggtctggatgccggtggcagtcatacttatcgcgatgatgtccatacaaagcggcgcgtcgctggcaaaatcgctgtttccgctggttggtgcgcccggcgtcacggcgctgcgtatcgcattaggcaccctgatcctcgtggttgtttttaaaccctggcggctacggtttaaaaaggagcagcgactgccactgcttttttatgggctggcgctgggagggatgaactacatgttctatctctctattcagacgatcccgctggggatcgcggtcgcgcttgaatttaccggcccgctggcggttgccctcttctcttctcgtcgtccggtagactttatctgggtcgtactggccgtgctggggctatggttcctgctgccgctcgggcaaagcgtttcacaaatcgatctgacaggagcagctctggcgctgggcgcgggggcatgctgggcggtgtatattctcactggccagcgtgcgggggaagagcacggccccgcgacggtcgccttaggctcgctgattgccgccgttatctttgtcccgattggaatggcacaagcgacagactcaatatggcaatggtcaatcctgccggttgggctggcggttgccattctctccacggcgctgccctactctctggagatgatcgccctgacgcgcctgcccacacgcatttttggtacgctcatgagcatggagcccgcgctggccgccatctcaggaatgattttcctcggtgaaaccctgaccctggtacaaacgctggcgctctgttccattatcgcggcgtctatgggctccaccctgaccatgcgtccggaacctaaagtggaaaaaatagacctcaactaagccttaaattctgcatggctaacccgccatgcagaatatacgccacgtcagtagctcaaataatttcttacaaactctctcatattgccaaaatatttcacctgctcgccttccggcaaagcgaattaagattgatctgtatcaatttaaataaaccacttacttttcaaatagttgataatacaaccttcctttcgctattaaaccgataggcagagccaaaccgcagagaaaaaatccggtgctatacttagtcccgtaattacctgggacacaaacatcaagaggatatgagattatgagtaccgctaaactggtgaaaacgaaagcgtctaatctgctttatacccgtaacgatgtatcggatagcgataaaaaagcgaccatcgagttgctgaatcgccaggtggtccagttcatcgatctttcgctgatcaccaaacaggcccactggaatatgcgcggtgcaaactttattgccgttcatgaaatgctggatggcttccgcacagcactggtgactcacctggatatcatggccgaacgcgccgtacagctcggtggcgtggcactgggtaccacacaggtgatcaacagcaaaacgccactgaaaagctatccgctggatatccataccgttcaggatcacctgaaagagctggcggatcgttatgcgattgtggcgaacgatgttcgtaaagcgattggcgaagccaaagatgaagataccgctgatatcttcactgccgcatcacgcgacctggatcagttcctgtggttcatcgagtccaacatcgaataatccctgcggattgtccgaataaccctcgctcctggcgggggttttgcacatttatggtgcgcacttttgcccgcaatgtccgcaaaagtgaataaaatgtaattatcacctcacacaaccgttaacggaagattgttttttcgtcagattctgcgctaaatatccccctgtcagaagaccttaacgaagcgcaccaaaacggtgctccattctggtgcaacctggcaaaattgnnnnnnnnnnnnnnnnnnnnnnnnnnnnnnnnnnnnnnnnnnnnnnnnnnnnnnnnnnnnnnnnnnnnnnnnnnnnnnnnnnnnnnnnnnnnnnnnnnnnnnnnnnnnnnnnnnnnnnnnnnnnnnnnnnnnnnnnnnnnnnnnnnnnnnnnnnnnnnnnnnnnnnnnnnnnnnnnnnnnnnnnnnnnnnnnnnnnnnnnnnnnnnnnnnnnnnnnnnnnnnnnnnnnnnnnnnnnnnnnnnnnnnnnnnnnnnnnnnnnnnnnnnnnnnnnnnnnnnnnnnnnnnnnnnnnnnnnnnnnnnnnnnnnnnnnnnnnnnnnnnnnnnnnnnnnnnnnnnnnnnnnnnnnnnnnnnnnnnnnnnnnnnnnnnnnnnnnnnnnnnnnnnnnnnnnnnnnnnnnnnnnnnnnnnnnnnnnnnnnnnnnnnnnnnnnnnnnnnnnnnnnnnnnnnnnnnnnnnnnnnnnnnnnnnnnnnnnnnnnnnnnnnnnnnnnnnnnnnnnnnnttttgtgcaatgcgtgacatcatcccctttgcaaaacaacagcttgtaaaattggcacgattttttcattgtgcctgaggttctcgcaggggatcgccccgtggatataaaaggaaatgctatgaagtctgtattaaaagtttcactggctgcacttaccctggcgtttgcggtgacctcgcaggccgccgacaaactggttgtggcgactgacacggcgttcgtaccgtttgaattcaaacagggtgataaatacgttggttttgacgtggatctgtgggccgctgtcgcaaaagaactcaaactggattacaccctgaagccaatggatttcagcggcattatcccggcactgcaaaccaaaaacgttgacctggcgctggcaggcatcaccattaccgaagaacgtaaaaaagccatcgatttctctgacggctactacaaaagcggcctgctggtgatggtgaaagcggataacaacgacgtgaaaagcgtgaaagatctcgacggtaaagtggtcgccgtgaagagcggcaccggctccgttgattacgcgaaagccaacatcaaaaccaaagacctgcgtcagttcccgaacatcgacaacgcttacatggaactgggcaccaaccgcgctgacgcggtgctgcacgacacgcctaacatcctttacttcatcaaaaccgccggtaatggcaagttcaaagcggtaggtgattccctggaagctcagcagtacggtattgcgttcccgaaaggcagcgacgacctgcgtaacaaagttaacggcgcgctgaaaaccctgaaagagaacggcacctataacgaaatctacaaaaaatggttcggtaccgagcctaaataatttcacctgacttcaggtttgtaacgcccggtggcgcttccgcttaccgggcctacgttttttgtttttcaccacggtatacaggaatacatcatgcagtttgactggagcgccatctggcctgccattcctctcttgcttgaaggcgctaaaatgaccctgtggatttcggtcctcggtctggttggcgggttgattatcggtctggtggccggtttcgcccgcacctacggcggctggattgcaaaccacatcgcactggttttcatcgaagtgatccgcggcacccccattgtggtgcaggtcatgttcatctacttcgccctgccgatggccttcaccgacctgcgcatcgacccgttcagcgccgccgttgtcaccatcatgatcaactccggcgcctacattgcggaaattacccgcggtgcggtgctgtcgattcataaaggcttcagcgaagccggcctggcgttaggtctttcccgtcgcgaaaccattcgtcacgtgatcctgccactggcgctgcgccgcatgctgccgccgctgggtaaccagtggatcatcagcattaaagacacctcgctgtttattgttatcggcgtggccgaactgacccgtcagggccaggagatcatcgcgggtaacttccgcgctctggaaatctggagtgcggtcgccgttgtctatctgattatcacgcttgtcctgagctttgttctgcgtcgtcttgaaagaaggatgaaaatcctgtgattgaatttaaaaacgtttccaagcactttggcccaacccaggtgctgcacaatatcgatttgaacatcaggcagggcgaagtggtggtgatcatcgggccgtccggttccggtaaatccaccctgctgcgctgcattaacaagcttgaggagatcaccagcggcgatttgatcgtcgatggtctgaaggttaacgatccgaaagtggacgagcgcctgatccgccaggaagcgggcatggtgttccagcagttctacctgttcccgcacctcacggcgctggaaaacgtgatgttcggtcctctgcgcgtgcgcggggccagcaaagcggcagcggaagcgctggcaagagatctgctggcgaaggttggtctggcggagcgtgcccaccactatccttccgagctgtccggcnnnnnnnnnnnnnnnnnnnnnnnnnnnnnnnnnnnnnnnnnnnnnnnnnnnnnnnnnnnnnnnnnnnnnnnnnnnnnnnnnnnnnnnnnnnnnnnnnnnnnnnnnnnnnnnnnnnnnnnnnnnnnnnnnnnnnnnnnnnnnnnnnnnnnnnnnnnnnnnnnnnnnnnnnnnnnnnnnnnnnnnnnnnnnnnnnnnnnnnnnnnnnnnnnnnnnnnnnnnnnnnnnnnnnnnnnnnnnnnnnnnnnnnnnnnnnnnnnnnnnnnnnnnnnnnnnnnnnnnnnnnnnnnnnnnnnnnnnnnnnnnnnnnnnnnnnnnnnnnnnnnnnnnnnnnnnnnnnnnnnnnnnnnnnnnnnnnnnnnnnnnnnnnnnnnnnnnnnnnnnnnnnnnnnnnnnnnnnnnnnnnnnnnnnnnnnnnnnnnnnnnnnnnnnnnnnnnnnnnnnnnnnnnnnnnnnnnnnnnnnnnnnnnnnnnnnnnnnnnnnnnnnnnnnnnnnnnnnnnnnnnnnnnnnnnnnnnnnnnnnnnnnnnnnnnnnnnnnnnnnnnnnnnnnnnnnnnnnnnnnnnnnnnnnnnnnnnnnnnnnnnnnnnnnnnnnnnnnnnnnnnnnnnnnnnnnnnnnnnnnnnnnnnnnnnnnnnnnnnnnnnnnnnnnnnnnnnnnnnnnnnnnnnnnnnnnnnnnnnnnnnnnnnnnnnnnnnnnnnnnnnnnnnnnnnnnnnnnnnnnnnnnnnnnnnnnnnnnnnnnnnnnnnnnnnnnnnnntgtcgtcgcgttttgcccagctctatcgcaacctggttggcacctcacataagccttttaatcctcacaccttttccgcagccgccacccagtttgctattctggccggcgccgtcttcattttttactggctgttgcgcctgtctgtctggccgctttaccggaaaatgggccagtggggacgcaaaaagaatcagcataaaagcagctggctgcatcttccggcaatgattaccggggcgtttgtcatcgatttgctgctgctggccctgacgctgtttgtcggccagatgctggccgaccgacttaataccggaaacaaaaccatcgcgtttcagcagggactgttcctcaatgcctttgccctgattgagttctttaaagccctcctgcggttgatcttctgcccgcgcgtgccggaccttcgccccttcgccatttcggatcagagcgccaaatactgggcggtgcggctcagcgtgctgagcgggttgatcggttatggcctgctggttgccgtgccgattatttccaaccaggttaacgtgcagttcggggcgctggcgaacgtgctgatcatgctgtgcattaccgtctgggcgctgtacctcatcttccacaataaaaaagcgatcaccgacagcctgctgcacctggccgatcgctccctctcctttttcagcctctttattcgcgcctttgcgctggtgtggcactggctggccagcgcctattttattgtgctctgtttcttctccctgttcgatccgggcaatagcctgaaatttatgatgggggcgacgttcaaaagcctggcgattatcggcattgcggcctttgtctctggcctgctctcccgctggctgtcgaaaacgatcaccctgtcgccgcaggttcagcgtaactacccggaactgcaaaagcgggtaaatggctggatgacggtatccctgaaggtggcgcgtattctgacggtctgcgtggcaattatgctgctgctgaacgcgtggggtctgtttgatttctggaactggctgcataacggcgcgggggaaaagaccgttgatattcttattcgtatcgcgctgatcttgttcttctccgccgtcggctggacgctgctggcaagccttatcgaaaaccgtctggtgtcggatgtccacggcaggccgctgccgagcgcccgcgcccgcacgctgctgactctgtgccgcaacgcgctggcggtgatcatcagcaccatcaccatcatgattgtgctgtcggaaatcggcgtgaatatcgccccgctgctggcgggtgccggtgcgcttgggctggcgatctcctttggttcgcagacgctggtgaaggatattatcaccggcgtttttatccagttcgagaacgggatgaacaccggggatctggtgaccatcggaccgctcaccggcacggtggagaggatgtccattcgctccgtcggcgtacgtcaggataccggcgcgtaccacattattccgtggtcatcgatcaccacctttgccaactttgtgcgcggcattggttcggtggtggcgaattatgatgtcgatcgtcatgaggatgcagataaggcgaagcaggcgctgcgggatgcggtgagcgaactgatggagatggaggatattcgcgggctggtgattggtgaaccgtcgttcgcgggtatcgtcgggctgacgaacactgcctttaccctgcgcgtgtcgttcaccacccagccccttaagcagtggacggtgcgcttcgccctcgacagcatggtgaaaaaacacttcgatctggcgaacgtgagagcgccggtgcagacgtatcaggtattgtcgccgcccgcttcgccgctgcctccgcaggagccgacgctgtaaccgagccgggtggcggcttcgccttacccggcctgcgatggggggctatttgcggcgtttgttatcgtccataaaggtccaggcgataaagcggctctgcttctggccctgcgccatctcttttttgaccactctcaccgcgccgacgtcggtcagggcgcggtaaagcggcggcaggttatcgccacgggaaaccagcgtggtaaaccatttcacctgacgaccgaagcccttactctcggcaatcatgcgcaaaataaatgccacttccccgccctcgcaccacaactcctgctgctggccgccaaagttcagcgcgccatcttcagcctggcccaggttacgccgcttgcgttcactgcccgcacgtgcggaggcggcggagtcgtggaatggcgggttgcacagggtggcatcatattgttcgttcttgtgaataatgccgttgaaaatagcagcgggatccttttgacgacgcaaacgaacggcccggcttaaccctgggttagcgttgataatggcctgtgcgctggcaaaggcctcggcgccgatctcgctgccggtaaaccgccactggtactcatgtgcgcctatcagggggtagatcaggttcgcgcccgtaccgatatcaagcacggtggcctgtttcggcaccacgccgccattatcatctgccagcagatcggcaagatgatggacataatccgcacggcctggcaccggtgggcagagaaagccatccgggatgtcccagtgcgtaacgccataaaaatgggccagcagcgctttgttcagcgtcttaaccgccagcggatcggcaaagtttaccgacggttcaccggctggtgtctgaacaataaaatcctgcaattccgggcagctcaggcacagggctttcatgtcgtagcggctacggtggcggttacgcgggtgcaatcccggcttttgggaagtcatggcattctcctttagacagccgcgtaagataccctgtgacggcgcgggggtaaatatctgtctgcgctgcacaaaaaaccgacgaaaatcagcaacctgtatgtctatgatctgtcagcaaattgtcagaatttatcgttcaaaaaacaagcagatcatcatcaaatttttgcgctaaatcacgcgcgtcaggcttctaaacttaagaggaatcacctgttgtttcccctgaggatgtgattatgaaaaagtatctgacctttattattgcgggtgcgctggcaggcgcatcgttctcagcctggtccgttcaacctctgaccgacagcaacgacaccagccagctacgtgcggccgggacggtctctgtcagccgggcaagcaaccttgatgaccttcaggacaagctggccgaaaaagctcgtcaggaaggggctaaaggcttcgtggtgaacgccgccggtggcgataaccatatgtacggcaccgcgaccatctataaataacgccctcttttcccacactgcatctgccaggcagatgcagttctcatttccttccttcgccttgactgtgcgttttttaaccccatattaagataaatggcttaaacagatcaggagaacatgatggcttccggctgggcgaatgacgacgccgttaacgaacagatcaacagtaccattgaagatgcggttgcgcgtgctcgcggtgaaattccgcgcggcgaaagtttgacggaatgcgaagagtgcggggatccgattcctgaagcacggcgtaaagccattcctggcgtacggctatgcattgcctgtcagcaggagaaagattcaaaaaatgcggcacattcaggatataatcgtagaggatcgaaagacagccagttacgttgactttcctttaccgaagttaaccgcgccagccgtttactttacgctcacgacttttagcgaaacgcgtagcaaaacgtgcccttccgatggcttctgtaaagcgcatccccaagaaatgtcaattgcgcttctgaatttattaataatcaataagttatttgtcattcaatttttttgagtaaccacgtcaattctcttcgattttatcttccactaaaaaccgtgatacttatcacatcgacggaacatcgtccccttaacagaataacctgcgagaattgacctatgaaaacaatcaaatatgctgttgccgctgttgccctgtccgctctgtctttcggcgctttcgccgtagagccagtctcctctactcaggcacaggatctgaacaaaatcggggtggtgagtgctgaaggcgcgaccacgctggacggtctggaagccaaactggcggaaaaagctgccgctgccggcgcaagtggatacaccatcacctccactaacggtaataacaaactgagcggtaccgcggttatctacaagtaatcgaacgaattatgctccaccctcaccctaccctctggtgagatgctccaaccctcattgaccctgttgttgttacccttgtttgcccgtccgccactggacgggctttttttttgcttaaaacgactgcgccacgcgctgcaacccggcgtccacggacgccacttcccctgccgccagcagacagcaggccatttgcagcttgatagactgcggaaccggcacctttccggccagacactgtacgatccagtgcgcggtgacttgcggatctttcgactcaggcaggatcacatcgctgttctcttccccacgttcgagcacgacccacgtcccggcaggctcaatcagcatcagctgtggacaacgctgcgggttggcgtaaacctccccttcagtcccgtgcatcagcagcgctcgcccgccgatttcggcaaagaattgaccgacccgcgtcacgtactccggatgggagacgctggaaagacgcagcgcggcgtcttcggcaaacggcgtcgccagcttcgccagggtgtgggcgctgttacgcacccccatgcgccagcgcatgtccagctgcttttccagcggcgggcagagcgcgcgcacgggaatatagaccggctggttcccctccagctttgcctgcgcctggccagcatggagagtgggttcgatgcctaataattccagaatggtttctgtcagcacgcgcgtcggatcttcgctcacgccatgcaccaccaccgggaaaccgagtttctgcaacagaatagccagcagcggcgtgaggtttgcctgcttacgcgcgccattgtaggtcgggatcacaatcggcatcggcttcgtgacgggcggggttaaacgcatcgtctgcgactgcatggcctcataaaaaccgcgcatctccgcctcaccttcccctttgatgcgcagcgcaatcagaatgccgcccatttccagatccggcacgtcgccattcagcatatgcgtgtacaacgtacgggccgtttcctggtccagatcgcgagcatggtttttcccacgccctacctctttgataattttgcggtaatccacgacatttctcctgacagcatcatcttgttaacaatatagcccgatgaacacgcacccgatagtgttttgtgatcattatcaacctgctgttttcaggtaaaaaaaataaactcaagcactatttgcattatttgtgattggaactaaagattcgtacctgccctttttttgattaaataaacatcggaaagttattaagggtcaacggtaaaaacgtccaggcaacgtttttgccagaaacacattgggatttactatgaacaaggttgcattagggttgtttatcgccacaacggtggggtgttctgcatccgcatttgcggaaaccaacggtgaagggcagattaatttcaccggagaaattatcgattctgcttgccaggtcgtgaatggattaagtaatccattagatgttcagttaggaaaagtatctaaaacggtatttaccggcgcaggctctaccagcacactcacgaagtttgatattaagttaaccaattgtccggaaaccgtaacctcggctgcgattaacttcggtggtaccccggatgcggataataatgccacgctggcattaacgcccgataccgatgcggctactggtgtagctattcagctaatggacgcttccgggcagcctgtcactctgtataccccttcgaagcaatatcctttagcctccggaacggaggttaacgacctggagttcggtgcgcgttatattcaaactcaggcggcagttactgcgggccctgctaactctgtatcgaccttcaccgttatttataactgatcttatcaatcctgagatattaatgctcttgcgggcattaatatctcatctttttattgagaaatctttatgcgccacggttatttactgagcactcttttactggtagcagcctcggcacaggcgggtgtcgtgatcaatggcacccgtctggtctatcagggagataaaaacgaatcatctcttggtctttcaaacccagataccacagattatctggtgcagtcctgggtcgattccggtggtaaaaacctggccaaagcaccgttcctgatcaccccgccgcttttccgactggatgcgaaagaagataacgtactacgcgtggtgcgtacgggaggaaatttaccggaagacagggaatctctgtactggctgaatattaaagcgatcccgtcctcaaagcatgttgaaggcgtaaatacgctgcaaattgccattaacacccgaattaaattgctgtatcgcccgtcagcggtaaaaggcaaaccagaagatatggccgataaacttgaatggcatcgcgaagggaatgatttagtggtaaataatcccacgcctttctatatgaattttcaggccgtcaccctgaatggtcagaaaatcacgaaagccacctgggctgtgccgaaaactgaaacgcattttgctttacctggcaatgtcggaggctcgaccgtcgtgtattccattattacggattacggcagcatcagccagacatggtctaaacccgttcattagtaatattgcccggtaataaaatcatcatgtacagccataaaaagccgttcacctgccgattttcgtcattgctgatgactttttgttgcctggcaatggcgatctttgcgcagcaggttttggctgatgattattttaaccctgccctgctggacattgataacccgcagcaggaaaagaccgatctgtctgtctatgaaaaaggtcccggtcaggcgccaggtaaatatcaggccgcggtatttatcaataacaataaaattgatacccgtgacgtgacctttaacgtagttaaagatccgcagggcaccagcacgcttcagccctgttttacactggacgaattaaagagcctcgggatcaaaacgcaaaaatatccgcagctgagggcagaaggtcaatgcgccgatctacacgccatcccttcggcatccgcgacctttcgcgtgcgcaatcagcagctgctgctgagcattccgcaaaaggcgctcggacaggtgccacgcggttacatcgacccgaaagagtttgacgaagggatcaacgcgggcctgcctaattacagcgtcaacgccagccagagccatgcgcgccagcagggtgaagaggatagcagcagccagtacgttaacctgcgtcccggcttcaacctcggggcatggcgcgttcgtaactactccacctggaatcgcagcaccacgggccacgaggaggaacagaaattcacctccgtttatacctatgcgcaacgcgatatggtggcaatgaaaagtgacgtgacggtgggccaaagcacctcaccttccgacgtttttgacagcgtcccctacaccggcgtggagctgaaatccgacaacgacatgctgccggacagcgaaaaaggctatgcccctattattcgcggcaccgcccacagtaacgcgctggtgatggtccgccagaacgggtacgtgatttatcagaacacggtcgcgccgggcgcattcgaaattaacgacctctaccccaccggcagcagcggcgacctccaggtcacggtgaaagaaactgacggcagcgaaagtcatttcgtggtgccgtttgcctccgtgccggtattgcagcgtgaaaaaaacctgcgctacagcgtaaccgccgggcgttatcgctcttatgacaaagacgttgaaaagaccccgtttgcccagggaagcgccatctacggtttacctcacggcttcacggcctacggcggcgtgcagcagagcagccactatcagtcccaggcgctcggcgccgggaaaaacatgggcgatctcggggcgttctccattgacgtgacccgcgccagagccctgctgaaaaaacagcagtccagcaagggccagtcgtggcgcgtacgctacagcaaagatttcgccggttcaggcaccaacttttcgcttgcgggctatcgctataacagcaaggggttttacaccctggacgacactatggagtcgtatacccgcgccgacgactggtctgctccccagcagcgccgcgcccgtacagaagccaccattgaccagacgctgccagaaggttgggggtcggtgacgctgagcatggtgaaggaaacttactggagccagagccagaacatgacctccctgagcgtcagctacaacaacagctggcacggcgtgagctacagcctcagctacagcatgaacaaaaacacccacgacagcgatgaagacggtaatgaggtaacaaacgacaaccagttctcgctgagcgtttcggttccgctggatcgctggatgcataatacctgggccacgtacaacctgaacaacaccaaagatggcaccacgcagaacatcggtcttaacggtacggccctgaaagaagacaacctgaactggaatatccaggaagggctgagcagcaccggcagcggtaactccaccagcatcaacaccgattacaaagcgacctacggcgaagtgagcgcaggcgtcagtcaggataagtatcagcagaccctgaacgtcggtttgcagggcggcgtggtggcccacgctaacgggataaccctgagccagccgctcggtgaaaccatcgcgctggtgaaagcgccaggtacgcacggcacccatatcaccaaccagacaggcgtggagactgacttccgcggctataccgtcgtgccgttcgtgaccgcgtatcgccataacaccatcgcactggataccgaaacgctgccggaggatgccgacgtcacccacgcggcgcagatcgtgacgccgacccgaggggccgtggtgcgcgccagctttactacccgcgtgggtaatcgcgtcctgatgacgcttacacaaaatggtaaaccgctgcccttcggcgcaacggtcaccaccggggataaggacagcgaatttattgtcggaaatgacggccagacttacctctcgggtctgccgcagcaagggcatctcaacgtttcctggggacaggaggcgagcgagcactgcgtcgctgactatgcgctaacggatgagaaagagaaaaccagcatcattaacgctgccgcgcagtgtcattgattaccgttcaggctaacgattatgcaaatgattaaacagtgctttttcttactggttctgggaaccgccgcgttatttatgccgcatgcgaaggcgacctgcaccacgccggatctgcccaaaatgattaacgtggcctccatctctgtcccgacgacgctggccgttggcgcaactatcccgggtacagagcaaagcgttcatgttgccgggcactgcgatcagagtattgacagcggtctggaaattgtttcctgctactacggcaccggcgcggaaattcctgggctcaggggcgtttatgattccggcgtaccggggattggggtcgcactaatgaacgatcagggtcagcgaatcagcggagcaggcggagtacagtgcgattcacgcggaacgcctgttgcctatgtttctaccgatggcacacagtcgtttaactttgacgtcacgcttgaactggtgaaaacaagcgacgccgtgacatccggcacgctggtgcagtctcagaccgaattcggcattggcgtttttggccatgaagggatcggcagccctaaccatattgcgtattcaggtaacgtcattttgcatcaggtcacctgctctgtttcgccaaaaaatctcaccgttaatttgggcgattttcccgtcagtgattttatgagcgtggggtttttatccagccccgctcagacgtttaatatcaccgttaactgtgacacaaccgttcagcctgagctaaaaatcaccagtgctaacgggtacgaaacggcatttgagggagtgatcaaactgacgaagcagacgggcatggcaaggggcgtcggggtaagaatgctgtttgatgaccatatcgcgacctttgactcctacgtcaacacccaaagccaggccgttgccaatgaaacgctggatatcccctttcaggttcgctacgagcagaccagcgatgtggtgacgcccggccccgccaacagcgtagcaaccatcactctcgcctataagtgacaaacatgaaaaagacaatcgcgtttctggcggtgggcttactggcccaggctcacgcagacgacattcagatccaaatgacgggaaatatttacgccaatacctgcgtcattgacagcgccagccgcaacctgacggtggacttaggccaggcggtgtcgggcagttttagagacgtgggggataccggcgagtggaaagacttttccctgtcagtatcgcactgcccagccacgctggcgcttgccacggcctttttctatggccaggcagacagcgtgcatccgaccaaatttgccaatatcggtagcgcaaagggactggcgctggagctggcagaccgacaggacaaaatactgattgccccgcaggccgcctttaacgccgccatcaatccgagcgaccacacggcaacctttcctctgtccgcacgctactacgccacctcaatgcccgtcactgccgggacgttcagcagcgtgattcaggtgacattcacttaccagtaggaccgcgcctctttgcacggatgctttttgtacgcccggcagagggttttgccgggcgtttttttacctccggcacttctggctgctcaatcgggaagatcggcagcgcattcagcagccgctggccatagtttttggtaagcaggcgtttgtcataaatcaccacctcgccccagcagccgtggctacggatcaagcgcccgacctgctggatcaggttaaacgacgccgcaggcaggctttgcacttcaaacggataacggttaaggcttttcagccattcgccttcggtgatcaccaccgggctgtcgatgggcgggaaggcaattttatggatatgcacctgcgtcaggtagtcgccttttaaatccagcccttccgcaaaggactgtagccccaccagcacgctacgctcgccgttatcaatgcgtttacggtgcgtttccaccagccgatagcgcggctgatcgccctgcaccagcaggagtaagcgcagatcggtgacgtgctccaggaagcgttgcatcgcgcggccgctggcaaacagcaccagcataccggggtattttttactctcaacttgctcgcggaagtaggccgccatttccgcaatatgctgctcttcgttatcgataagcggctcatagttcatgcgcgggatcaccagcttgccctgctcacagtggttgaacggcgagtccagggccacaaaacggtcccccgctttctctttcaggccgctcatttcctgtaaccttgagaagctgttcagtgaacgcagggttgccgacgtcactaccacgtgcggcacgctgcgccagatcagcttttccagctgatcggccacgcggatgcccacgcagtggaagaacagatgtacctgtccgtctcgcacttcgcgggtggcccactttgtcactggcgccccggacgcctgcgccatcgaggccagccgccagagtttgctctgcgcctcaaacatgcccagcgcgcggttcatttgcagcagaatgcggtgcaagcgcaccacgtcatgggtaccggttttctcgctgagatcgtttaagaacatctccgccagcccgcgcagcttttcaaggtgcttcgccagctgctggcaaatctccatcacttcctgtggcaactcacccatcgcaaagcggtgttccgcttcctgggtggcggggagatacaggttgagaatgttattcagcgaggcgatgaggccgtacacctcttcacagtgctcgctcaaccgctccgggaccgccagcggcggcgtggttttcgggcggaactgctccatgcaggttgccaccagcttgcagaacagatcgagttgcaggcgaaaccacggggcggtaatttccgcactcatctccagcgcatcccgcgccacgtcgggcagatgatgaccttcatccagcaccagcagcaggtttttgggctccggcaggaccgcttcactctccagggcagccatcaccagcgcatgattggcgacaaccacctccgcttcctgaatctcacgccgggcgacaaagaacgggcactcgcgatagtaatgacagttgcggttcaggcagctcgctttatcggtgctgagcctgcgccacaggtcgtcgccgatcgcctggctggtgtgatcccgcaggccgtcccacctgtagccgtcgagatcggcctttagctttgcgcactgctcctgctccgccttgttgtttggcgtcagctcgtcatcaagaaacgcgagcagatcctgctgggagggttcactgctggccagcgccgccagattgcgcgggcagacgtagcgcccgcgaccaaaggcggcggtgaaccgtaaatcggggataattttgcgcagcagcggcaaatctttgctgaagatctgatcctgcaaggccacgttagcggtactgaccaccagcgttttgtcttcttcccgcgcgatggcaatgccgggaatgagatacgacagggttttcccgacgccggtcggggcttcaatcgccagatgtcgcccgtcgtccccggcgagcgttttcgccacgtcggcaatcatctgccgctgcggggctcgggggataaaatcggggatctgctgttgtagcgccttataccatgcgccaatttgcgccttgagcgcagcggttaaagccatcggaaaacctgaaatactgtataaacagccactattgtggcactttctctccgctgccgcaaaaagaaaagcccggctttacgaccgggcttccagattactgcgggttagcaggtttacgcgggcggcgtcggcgctgcccctcgcctgccggtttcccttcgccgctacgccacgggttttcacccggctggtttgctgtcgttannnnnnnnnnnnnnnnnnnnnnnnnnnnnnnnnnnnnnnnnnnnnnnnnnnnnnnnnnnnnnnnnnnnnnnnnnnnnnnnnnnnnnnnnnnnnnnnnnnnnnnnnnnnnnnnnnnnnnnnnnnnnnnnnnnnnnnnnnnnnnnnnnnnnnnnnnnnnnnnnnnnnnnnnnnnnnnnnnnnnnnnnnnnnnnnnnnnnnnnnnnnnnnnnnnnnnnnnnnnnnnnnnnnnnnnnnnnnnnnnnnnnnnnnnnnnnnnnnnnnnnnnnnnnnnnnnnnnnnnnnnnnnnnnnnnnnnnnnnnnnnnnnnnnnnnnnnnnnnnnnnnnnnnnnnnnnnnnnnnnnnnnnnnnnnnnnnnnnnnnnnnnnnnnnnnnagatttcggcgcgccaccttcggcacgacgcggctgctgaccgcgaccgccgccgccctgaccgcgaccgccgccctgacgaccgttctgaattggctcggctttgatcgacgggtccacttcataacccggggtctcaatgcgcgggatctctttcttcagcaggcgttcgatgtcgcgcagcagcttgtgttcatccacgcagaccagagagagcgcttccccggttgccgccgcacggccggtacggccgatacggtgcacgtagtcttccggcacgtttggcagctcgtagttcaccacgtgcggcagctcttcaatgtccaggccacgggcggcgatgtcggttgccaccagcacacgtatgtcgccggatttaaaatcagccagcgcgcgggtacgcgcaccttgactcttgttgccgtggatcgccgcgctgcgaataccgtctttattgagctgttccgccaggtggttagcgccgtgcttggtgcgggtaaagaccagtacctgctgccagttgccctggccgatcatctgggagagcagttcccgcttgcgcttcttatccacaaagtgcacgtgctgcgtcacctgctcggaggcggtattgcggcgcgcgacttccacttccagcgggttatgcagcagcttttccgccagtgccttgatctcgtcggagaaagtcgcggagaagagcaggttctgacgacgcgtcggcagcttcgccagcacgcggcgaatgtcgtggatgaagcccatatccagcatacggtcggcttcgtccagcaccagaatttcgatgttatcgagcttcaccgcgttctggtgttccagatccagcagacgccccggcgttgccaccagcacgtccacgccgccgcgcagcttcatcatctgtgggttaatgcttaccccgccgaaaaccaccagcgaacgaatgttgaggtagcggctgtattcacgcacgttctcgccaatctgggccgccagttcgcgggttggggtgaggatcagcgcacgcaccggacgacggcctttggcgtgcggctggttttttaccaacagctccagcagcggcagggtaaagcccgcggtcttaccggtaccggtctgcgcgcttgccatcaggtcacggccctgcaaaacggccggaatggcctgctgctggataggggttggctcaacgtagccctgctctgcgatggcgcgcagaatttccgggttcagaccaagggaatcaaaagacataaaaactccgaaccgccccgaccatcacaggtgtagttttcagggagatataacgaatagaaggacaaaaaccacaatgtcgcgaaggagcggagtgtagcagcttttgtgacgtggcgcataaaatatccccggcgatgactcgacgtttgcgcaaatcaggcataatcttaatcaatcgattgattaatttttaatgctgctatgaatacaaccccaacgacaaccaaaggcgaacaggcgaaaagtcagcttatcgccgccgcgctggcgcagtttggcgagtatggtctgcatgccaccacgcgggatatcgccgctcaggccgggcagaatattgcggccattacctactattttggctcaaaagaggatttatacctcgcctgcgcccagtggatcgcggattttatcggcaccagctttcgcccgcacgtggaagaagccaccgcgctgttcagccagccagagcctgaccgggctgccatccgccagctgatccttaacgcctgtcacaacatgatccgcctgctgacgcacgacgatacgctgaacctgagcaaatttatctcccgcgagcagctctcccccactgccgcgtaccagctggtgcacgatcaggtgatcgccccgatgcacggccatctgacccggctgatcgccgcctataccggacgggacgccagcgataccgacaccattttgcatacccacgccctgctgggcgaagtgctcgccttccgtctggggcgtgagaccatcctgttacgtacgggctggacacaatttgatgaggataaagccgcgcaaattagccaggtcattacctgtcacgttgatctgatcctgcaaggcttaacgcaaaggagccagaagtcatgaaaaaacctgtcgccatcattctggtggttgttgtcttgcttgccgcgggaacaggcggctggctgtggtatcagagccagcaggatcgtgccctgacgctgtacggcaacgtggatattcgcaccgtgaacatgagcttccgcgtcggcgggcggctggcctcgctgaacgttgacgaaggcgatgccatcaaagccgggcagacgctggggatgctggacaaagccccgtttgagaacgcgctgatgcaggcaaaagcaggcgtctccgtcgcacaggcgcagtacgacctgatgctggcgggctaccgtgacgaagagatctcccaggcggccgctgccgttaagcaggcgaaagccgcctatgactatgcgcagaatttttataaccgtcagcaaggcttatggaaaagccgtactatttccgccaacgacctggaaaatgcgcgctcatcccgcgaccaggcacaggcgacgctgaaatctgcccaggataagctaagccagtaccgcaccggtaaccgtgcgcaggacattgcccaggcgaaggccagccttgagcaggcccaggcgcagttagcccaggcggagctggatctgcacgacaccacgttaatcgccccgtctgacggcacgctgatgacccgcgccgtggagccgggcagcatgctcagcgcgggcagcaccgtgttaacgctctccttaacccgtccggtgtgggtgcgcgcttacattgatgagccgaatcttggccagatgcagccgggccgtgaactgctgctctataccgacggtcgcccggacaagccgtatcacggcaaagtgggcttcgtctcccctaccgccgagttcacaccgaaaaccgttgaaaccccggacctgcgtaccgacctggtgtatcgcctgcgcatcatcgtcaccgatgcggacgacgcgctgcgtcagggcatgcctgttaccgtgaccttaaacgacggggaacgacatgaatgatgcggttatccagctcaacaatctggtcaaacgcttcccgggaatggctaaaccggcggtcgcgccgctgaactgtacgattcagaaaggctatgtgaccgggctggtgggtccggacggcgcgggtaaaaccacgctgatgcggatgctggcgggattgctgaagccggatgaaggcagtgccagcgtgcttggcctcgatccgatcaaagacgacgcggcgctccacggcatgctcggctatatgccgcagaagtttggtctgtacgaagatctgacggtaatggaaaacctcaacctgtatgccgatctgcgcagcgttaccggcgaaacccggcagaaaaccttccagcgtctgctggcgtttacctccctcggcccgttcaccgaccggctggcgggcaaactttccggcgggatgaagcagaagctggggctggcctgcacgctggtgggcgaaccgaaggtgctcttgctggatgaacccggcgtgggtgtggacccgatttcccgccgcgagctgtggcagatggtgcacgagctggcgggtgacggcatgctgatcctctggagtacctcttaccttgatgaagcagagcagtgccgcgacgtgctgctgatgaatgaaggcgaactgctctatcagggcgaacccaccgagctgacgcaaaccatggccgggcgcagttttctgctgcacagcgcgcaggagtccaaccgcaagctgctgcaacgggtactgaagctgccgcaggtgagcgatgggatgattcagggccgttcggtgcgcgtgatcctcaaaaaagagactaccgccgacgatatccgccgtgcgcagggtatgcctgagatcgacatgacagagaccgcgccgcgctttgaagatgcgtttatcgatctgctgggcggggcgggaacctcagaatcaccgcttggcgccatcctgcacacggtggaaggcacgccgggcgaaacggtcattgaagcaaaatcgctcaccaaaaaattcggcgatttcgccgccaccgataacgtcaattttgccgtgaagcgcggcgagatatttggcctgctcgggccgaacggcgcggggaaatccaccacctttaaaatgatgtgcggcctgctggtaccgacctccggcaaagcgctggtgctgaacatggatctcaaagtcagctccggcaaggcgcgccagcacctgggctatatggcgcagaagttttcgctctacggcaacctgacggtggagcaaaatctgcgatttttctccggcgtctacggcctgcggggacgggcacagaatgagaagatcggccgcatgtgcgacgccttcggcctgaccgatatcgcctcacacgctaccgaagcgctgccgcttggcttcaaacagcggctggcgctggcctgctcactgatgcacgagccggatatcctgtttcttgatgaaccgacttcaggcgtggaccccctcacccgccgagaattctggttgcatatcaatagcatggtggaaaaaggcgtgaccgtgatggtcaccacccactttatggacgaggcagagtattgcgaccgcatcgggctggtctatcgcggcaagctgattgcccacggcacgccggatgacctgaaagcgcaggccgccgacgacgcgcagccagacccgaccatggagcaggcgtttatcaccctcatccaagactgggataaggagaatactcatgcgcagtaacaccctttcctggcgccgggtgcgcgccctgtgcgtcaaagagacgcggcagattgtgcgtgaccccagcagctggctgattgcggtggtgatccccctgctgctgctgtttattttcggctacgggattaacctcgactccagcaagctgcgggtcgggattttgctggagcagcagagcgaagaggcgctggacttcacccacgccatgaccggctcgccctacatcgatgccaccatcagcgacaaccggcaggaactgatccagaaaatgcaggccggaaaaattcgcggtctgatcgtcattccggtcgattttgccgccaatatggcacgcccgggcgccgatgcgccaattcaggtgatcaccgacggcagcgagccgaacaccgccaacttcgtgcagggctacgcggagggtatctggcagctctggcagatgcagcgcgccgaagaccgggggggaggagtttgaaccgctgattgacgtgcagacgcgctactggtttaaccccgccgccatcagccagcattttattattccgggggcggtcacnnnnnnnnnnnnnnnnnnnnnnnnnnnnnnnnnnnnnnnnnnnnnnnnnnnnnnnnnnnnnnnnnnnnnnnnnnnnnnnnnnnnnnnnnnnnnnnnnnnnnnnnnnnnnnnnnnnnnnnnnnnnnnnnnnnnnnnnnnnnnnnnnnnnnnnnnnnnnnnnnnnnnnnnnnnnnnnnnnnnnnnnnnnnnnnnnnnnnnnnnnnnnnnnnnnnnnnnnnnnnnnnnnnnnnnnnnnnnnnnnnnnnnnnnnnnnnnnnnnnnnnnnnnnnnnnnnnnnnnnnnnnnnnnnnnnnnnnnnnnnnnnnnnnnnnnnnnnnnnnnnnnnnnnnnnnnnnnnnnnnnnnnnnnnnnnnnnnnnnnnnnnnnnnnnnnnnnnnnnnnnnnnnnnnnnnnnnnnnnnnnnnnnnnnnnnnnnnnnnnnnnnnnnnnnnnnnnnnnnnnnnnnnnnnnnnnnnnnnnnnnnnnnnnnnnnnnnnnnnnnnnnnnnnnnnnnnnnnnnnnnnnnnnnnnnnnnnnnnnnnnnnnnnnnnnnnnnnnnnnnnnnnnnnnnnnnnnnnnnnnnnnnnnnnnnnnnnnnnncgcccgcgccaaagcctttacccatgtcctgcttctggaaagcccgcaggcgatccagcccaccatcgacacgcaaaaagcattattgctggtacgcttcccggcggacttctcccgcaacctggacacattccagaccgcgccgatgcagctgatcctcgacggacgtaactccaacagcgcccagattgcggcgaactatttgcaacaggtggtgaaggattaccagcaggagctgatggcgggcaaacccaaacccaacaacagcaagctggtggtgcgcaactggtacaacccgaacctggactacaaatggtttgtggtgccgtcgctgatcgccatgatcaccaccattggcgtgatgattgtcacctcgctgtccgtggcgcgcgaacgtgagcaaggtacgctggatcagctgctggtctcaccgctcgccacctggcagatatttgtcggcaaggcggtgccggcactgattgtcgcgacgttccaggccaccatcgtgctgggggtgggaatatgggcgtaccagatcccgtttgccggatcgctggcgctgttttacttcacgatggtgatttacggcctgtcgctggtggggtttgggctgctgatttccgcgctctgctcaacgcagcagcaggcgtttatcggggtgtttgtctttatgatgccggcgatcttgctttcagggtacgtttcgccagtggagaacatgccggtgtggttacaggatttgacgtggataaacccgattcgtcacttcacggatatcaccaagcaaatctatctgaaggatgcgagtctggatattgtatggggaagtttgtggccgctactggtcatcgcggccacaacgggctcagtggcctatgcgatgtttagacgaaacatcgcgtagttttttctctttggtgagcaatgacaccaccgcaggccctgcgaggatagccagacccgccagggccagcagcaggttgttttgcagcacgcgtgacaacagccacaggacgatcattgccgcaccaaaataccaggtggtggtgagctcttcgagcacatcacccacttcacgccagcgcgcgtcgtggtgacgctgtaaaaacagcatcgacagcacggtcacgccgtaaaccacgcataaccctaagccgacacgcaccagcgtgccgctcatccagcccatcaccagtacggccacgaccagtaaatgcaacattatctgccagcaactcaaaccggttgcgacacgaacgcgttgttgccacttcatggcttctctcctgaaggatttttctctgctaattcagactaccgcactttacggaaaattccgtaacgccgcatctttttgtgacgcctactacactttattttcatcgggatagtcacccaggaaggtgtttatgagcaaaaaacgcagcatttctcgcttaaggtgctgacgataaacattcataagggcttcacagcatttaaccgccgcttcattttaccggagctgcgcgacgcggtgcgcaccgtcggcgccgatattgtctgcctccaggaggtcatgggcgcgcacgaagtgcaccctatgcatttcgaaaactggcccgacacgccccactacgagtttctggcggataccatgtggagcgattacgcctacgggcgcaatgcggtctacccggaggggcatcacggtaacgcggttctgtcgcgttttcctatcgagcattatgagaaccgcgacgtctccgttggcgagagcgaaaaacgcgggctgttatactgtcgtatcacccccccggcgctcgattttcccattcatgtgggctgtgttcatcttggcctgcgtgaagcccaccgtcaggcccagctacagatgctggcagactggaccaatgcgctgccggagggcgagcccgtcgtggtggccggtgatttcaacgactggcgacagcgggccaaccatccgctgaaggtgaaggcggggctggaggagatctttacccgctcacgcggtcgtcccgcgcggacgtttccggtgcgcttccccctactgcgccttgaccgcatttacgtaaaaaatgcccacgccagcagcccgactgcgctggctttactcaactggcgacatctctccgaccatgccccactcagcgcggagattcacttatgaaatgcacatggcaggaaggtaaccgtattacgctgctggaaaatggcgataacttttatccggcggtttttgaggcgattagccacgcacagcagaaagtctttctcgaaacgtttatctggtttgaagacgatgtgggcaggcagttgcacagcgcactgctgcatgccgcccgtcgcggtgtaaaaatcgaggttctgctcgacggatatggttcgccggatctcagcgacgaatttgttaacgagctcaccgccgcaggtgtggtgttccgctattacgatcccggcccgcgtctgttcggcatgcgcaccaacctgttccgccgaatgcaccgcaaaattgtggtggtggatgaaacggtggccttcgttggcggcattaactactccgccgagcatatgtcggattacggtcccgaagctaaacaggactacgcgatccgtatcgaaggaccggtggttcaggacatccagctgttcgtgctggaaaacttacccggcaaagaggccgctcgccgctggtggcgacgccgtcatcgcccggaagagaaccgcaagcccggcgaggcgcaggcgctgttcgtctggcgggataacgaggagcaccgggacgatatcgagcgtcattacctgaagatgctggcgaatgcgaagcgtgaggtgattatcgccaacgcctatttcttccccggttaccggattttgcacgccatgcgcaacgcggcccgacgcggcgtgagcgtgaagcttatcgtgcagggtgagcccgatatgccgattgtgaaggtcggcgcgcgtctgctctatcgctatctggtcaaaagcggcgtgcagatctatgaatatcgccgccgcccgctgcacggcaaagtcgccgtgatggatgaccactgggcgaccgttggctccagcaacctcgatccgctgagcttatcgctcaatctggaagcgaacctgatcatccacgatcgccagtttaatcagaccctgcgcgataaccttcagggacttatcaataaagactgcgtgcgtgtggatgagtctatggtgccaaaacggagctggtggaacgtgggcatcggcgtggtggtgttccacttcctgcgccacttcccggccatggtgggctggctgcccgcgcatacgccgaaactggcgctggtggatccgcctgtgcaacccgaaatggaaacccaggaccgcgtagaggcggaagatggagggaaaacctgatgtcgaaatctcatcctcgctggcggctggcgaaaaaaatcctgacctggctgttcttcattgccgtcgcggtcctgctggtggtgtatgcccaaaaggtggactgggaagaggtgtggaaagttattcgcaactacaaccggacagtcctgctgggggccgttgggctggtgattgtgagctacctgatgtacggctgctatgacctgctgggacgtgcctactgcggacataagcttgccaaacggcaggttatgctggtgtcattcatctgctatgcctttaacctgacgctgagcacctgggtgggcgggattggtatgcgctatcgcctgtactcccgccttggcttaccgggcggcaccatcacgcgtattttctccttaagcatcaccaccaactggctggggtatatcctgctgggcggggtgattttcaccatcggcgtggtgcagctgcctgcgcactggtacatcgatgaggctaccctgcgcatcctgggcatcgtactgctgctgatcatcgccgcctacctgtgggcctgcgcctttgccaaacgtcgtcacatgaccattaaaggccagaagctggtgctgccgtcatggaagtttgccgtcctgcaaatggtggtttccagcgctaactggatggcgatgggggccattatctggctgttgattggcgaagatgtgaactacttcttcgtgctgggcgtgctgctggtaagcagtattgccggggtgattgtgcatattccggcgggtattggcgtactggaagcggtgtttatcgcgctgcttgcgggggagcatgtgtctcacgggacgattatcgccgccctgctcgcgtaccgcatgatctactacttcctgccgctggcactggcaacggtctgttatctggtgctggagagtcgggcgaagaagctgcgcgcgaagaacgagaggatgttggcgaagtgagttgtgtcgggtagcgctgcggtctgatgnnnnnnnnnnnnnnnnnnnnnnnnnnnnnnnnnnnnnnnnnnnnnnnnnnnnnnnnnnnnnnnnnnnnnnnnnnnnnnnnnnnnnnnnnnnnnnnnnnnnnnnnnnnnnnnnnnnnnnnnnnnnnnnnnnnnnnnnnnnnnnnnnnnnnnnnnnnnnnnnnnnnnnnnnnnnnnnnnnnnnnnnnnnnnnnnnnnnnnnnnnnnnnnnnnnnnnnnnnnnnnnnnnnnnnnnnnnnnnnnnnnnnnnnnnnnnnnnnnnnnnnnnnnnnnnnnnnnnnnnnnnnnnnnnnnnnnnnnnnnnnnnnnnnnnnnnnnnnnnnnnnnnnnnnnnnnnnnnnnnnnnnnnnnnnnnnnnnnnnnnnnnnnnnnnnnnnnnnnnnnnnnnnnnnnnnnnnnnnnnnnnnnnnnnnnnnnnnnnnnnnnnnnnnnnnnnnnnnnnnnnnnnnnnnnnnnnnnnnnnnnnnnnnnnnnnnnnnnnnnnnnnnnnnnnnnnnnnnnnnnnnnnnnnnnnnnnnnnnnnnnnnnnnnnnnnnnnnnnnnnnnnnnnnnnnnnnnnnnnnnnnnnnnnnnnnnnnnnnnnnnnnnnnnnnnnnnnnnnnnnnnnnnnnnnnnnnnnnnnnnnnnnnnnnnnnnnnnnnnnnnnnnnnnnnnnnnnnnnnnnnnnnnnnnnnnnnnnnnnnnnnnnnnnnnnnnnnnnnnnnnnnnnnnnngaaataactagcgacggttgccgaagatacgcagcagcatcaggaacaggttgatgaagtccagataaagcgtcagcgcgcccagaatcgagtatttgcgcaggtttgaactgtcgcgaacatcaatttgttcaccgatgtttttcagcttctgggtgtcataggcggttaagcccacgaagatcaccaccccgatataggtcaccgcccacatcagcgcgtcactcttcagccacaggttcaccagcgacgccagcacgatccctatcagccccataaacagcatgttgccgaagccgctcaggtcacgtttggtggtgtacccgtacaggctcatcacaccgaacatcccgccggtcaccacaaaggtgctggcgatggaagagtaggtgtaaacgatgaaaatactggaaagcgtcagcccggtcagcgccgaatagagcataaacagcgtggtcgccatacccgcactgagcttgtgcaccagcccggagagcacgaacaccagcgccagttgcgcaataatcagcccaaagaaggtgattttgcttgagaagataaacatcatcagttcaggcgtgtttgccgcataccacgcgataaacgcggtaagcagcaggccaaccgtcatccagccatacacctgagccatgtaggtttgcagcccgctacgggtctgctgaactatcgaatcggaacgcggaaatcggtccatgattcactcctgattaagtaaacacacacgttaagagtaacacatccgcgtaaaccaactaccaacggctggcggcatgtttatcgctgtcgcgtgattccacccagcgctcaccttccggcgtcgcttcacgcttccagaacggcgctttggttttaaggtaatccatgatgaactcccccgccgcaaaagcactcccgcgatgggcgctggtgacgccgacaaacacaatctcttcgccgggccacatttcgccgatgcgatggataaccgtaacgcgccctagtggccagcggcctcgcgcctcttccacaatggccgccagcgatttttcggtcattcccggatagtgctccagcgtcagcgcttttacgctgtcgccgagattatgattacgcactttcccggtaaacgtcacgaccgcgccgtcttcgtcgcgcccggccagccagtcatattccgtgcccacgttaaaacgctcatggccgaccagaattcgggtttccgtcatcttaaccccctgtgaccggcgggaagaaggccacttcgtccccatcggccagcgggtgggtcaactccaccagcgtctggttcacggcggccagcagtttgccttcgtccagcgccagcgcccagcggtcgccttgcgccgccagatgcgcacgcagggcggcgacattttcgaaagagccgtccagcgtcaggctgtcggtattgaccagctcacggacctgggcaaaaaagagcaccttaatcatggctttccaccttaaaatcaccggatttgccgccgctttttgccagcagacgcaccgggccaatcaccatatctttctgcaccgctttacacatatcgtagatggtcagcgccgccacggaggccgccgtcaacgcctccatctccacgccggttttcccggttaagcggcacagggactcgatacgcacgcggttatgctccggcagtggctgcaaatttacctccactttgctgagcatcagcggatggcagagcgggatgaggtcccaggtacgtttagcggcctgaataccggcgatgcgggcggtggcaaacacgtcacccttgtgatggctgccgtcgataatcatcgccagcgtctccggcagcatggtgacgaacgcttcagcacgcgcctcgcgcaccgtttcggctttggcggagacatccaccatatgcgcttcgccagcggcgtttatgtgggtcagttgtgacatagcttatttctttaaatggggatgaaaattacacggacgggtacgggcatccagctgcggggcaataatgttttcccacgcggtgcggcaggctttggtcgaccccggcatggcgaagatcagcgtcttattcgccacccccgcgacggcacgggactgaagcgtagaggtgccaatctcttcaaaggagagcatgcggaacacttcgccgaagccttccacttcgcgatcgaacagcgggagcagcgcttccggcgcctggtcgcctgcggtaaagccggtgccgccagtgatcagcaccacctggacgtcatcacccgcaatccactgtgagacctgagcgcgaatggcgtaacggttttctttgacgatcgctttatcaacaatctggtgtccggcttcgtgtgccgcctcgcgcagccagtggccagaggtatcatcctcttcaccacgacgttcggaaacggtaagaatagcaatgcgtgtcgggataaattccgcgcttacctgactcatcttctggttccttctaaagcctgattacccgccgatataggacaggttctgagtaatgccggtgttgccctgatgcaggaaatgggtctgctttttgtgcgtcagcgcctcggaaatacgtgcttcaagcgcgtcctgctgggcgtcatcttccagcaaatcgcgtagatcgacgccgccatccccgaacaggcaaagatggagcttgccgacggaggagacgcgcaggcggttgcagctggcacagaagtctttttcatagggcatgatcaggccgatttcgccttcataatccggatgacaaaagacctgcgccgggccatcgctgcgctggcggatctggtggatccagccgcgtttcagcagttcgtcgcgcagaaccatgccggagatatgatggcgacggaacagctcgctaccctccccggtctccatcagctcaataaaacgcagttgaatgcggcgcggtttgatccacgccaggaaagtgtccagctgatggtggttcacatcacgcatcaacacggtattgactttgaccttgtcgaaaccggcggtgaacgcggcatcgatgccgtccatcacctgctggaacttatcctggccggtaatggcgtggaactgacgggcgtccaggctatcgacgctgacgttgatcgccgtcagccccgcatcgcgccagttcgccacgtcacgcgccatgcggtaaccgttggtggtcaccgcgatctggcggatacgttcgttttcacgcacggcggcaatgatgtcagggaaatcacggcgcagggagggctctcccccggtaagacgcactttttccgtgccaagttcnnnnnnnnnnnnnnnnnnnnnnnnnnnnnnnnnnnnnnnnnnnnnnnnnnnnnnnnnnnnnnnnnnnnnnnnnnnnnnnnnnnnnnnnnnnnnnnnnnnnnnnnnnnnnnnnnnnnnnnnnnnnnnnnnnnnnnnnnnnnnnnnnnnnnnnnnnnnnnnnnnnnnnnnnnnnnnnnnnnnnnnnnnnnnnnnnnnnnnnnnnnnnnnnnnnnnnnnnnnnnnnnnnnnnnnnnnnnnnnnnnnnnnnnnnnnnnnnnnnnnnnnnnnnnnnnnnnnnnnnnnnnnnnnnnnnnnnnnnnnnnnnnnnnnnnnnnnnnnnnnnnnnnnnnnnnnnnnnnnnnnnnnnnnnnnnnnnnnnnnnnnnnnnnnnnnnnnnnnnnnnnnnnnnnnnnnnnnnnnnnnnnnnnnnnnnnnnnnnnnnnnnnnnnnnnnnnnnnnnnnnnnnnnnnnnnnnnnnnnnnnnnnnnnnnnnnnnnnnnnnnnnnnnnnnnnnnnnnnnnnnnnnnnnnnnnnnnnnnnnnnnnnnnnnnnnnnnnnnnnnnnnnnnnnnnnnnnnnnnnnnnnnnnnnnnnnnnnnnnnnnnnnnnnnnnnnnnnnnnnnnnnnnnnnnnnnnnnnnnnnnnnnnnnnnnnnnnnnnnnnnnnnnnnnnnnnnnnnnnnnnnnnnnnnnnnnnnnnnnnnnnnnnnnnnnnnnnnnnnnnnnnnnnnnnnnnnnnnnnnnnnnnnnnnnnnnnnnnnnnnnnnnnnnnnnnnnnnnnnnnnnnnnnnnnnnnnnnnnnnnnnnnnnnnnnnnnnnnnnnnnnnnnnnnnnnnnnnnnnnnnnnnnnnnnnnnnnnnnnnnnnnnnnnnnnnnnnnnnnnnnnnnnnnnnnnnnnnnnnnnnnnnnnnnnnnnnnnnnnnnnnnnnnnnnnnnnnnnnnnnnnnnnnnnnnnnnacaaaagacgctaaacctgtaggcccggtaagcgcagcgccaccgggcaaaaaactacgatgccgcaataaacagatcccgcagctgatgcagctgatcgcggatttgcgcggcctcttcgaactccaggttctgcgcatgctgcatcatctgcccttccagctcgtggatcttctgctgcaacgctttcggcgtcagcgcgacggtatcctcttccaccactgaacgggccttgccgcggcctttcgctttggtcttcgcaatgttctgacccagcgccaggatatccaccaccttcttgttcaacccctgcggcgtgatgccgtgctcttcgttgtagcgctgctgcttctcgcgacgacgttccgtttcgccaatcgctttggccatcgacggggtgattttatccccgtacaggatcgccttcccgttgacgttacgcgcggcgcggccaatggtctggatcagcgagcgctcggaacgcaggaagccctctttgtccgcgtccagaatcgccaccagcgacacctcaggcatatccagcccttctcgcagaaggttaatgccgaccagcacgtcgaactcgcccagacgcagatcgcggatgatctccatacgctccacggtatcgatatccgagtgcagataccgcaccttctcgccgtgttcttccagatactccgtcaaatcttccgccatacgtttggtgagcgtggtaaccagcacgcgctcgttgatggcggagcgggcacgtatttccgagagcagatcgtccacctgcgtcgccaccggacgcacctcgataatcggatccagcagcccggtcggacgcaccacctggtccaccacgtcatcaccggatttttccagctcgtagttccccggcgtggccgatacgtagatggtctgcggagcaagcgcctcaaattcttcaaacttcatcggacggttgtccagcgctgacggcagtcggaacccgtactccaccagcgtctctttacgcgcgcggtcaccgcggtacatcccgccgatctgggggatcgtaacgtgggattcgtcgatcaccagcaggccgtccgccggaaggtagtcaaacagcgtcggcggcgcttcgcccggcccgcgcccggagaggtagcgcgagtagttttcgatgccggagcagtagcccaactcgttcatcatctccagatcgaactgggtacgctggctcaggcgctgctcttccagcagcttattgttcgccagcagcaccttgcggcggtccgccagctcggttttgatctcttccatcgcctgcacaatacgctcgcgcggcgttacatagtgcgttttcgggtagatggtgaagcgctggatcaccgactcgacgtgaccggtcaacggatcgaacagcgacaggcgttcaacctcttcgtcgaacagctccacgcgcagcgccatatcgtccgactccgccgggaagatatcaatcacctcgccgcgcacgcggaaggtcccgcgctggaacgcctgatcgttacgggtgtactgcaactccgccagacggcgcaaaatcgcacgctgatcgatgatcatcccctgcgtcaggtgcagcatcatcttgagatagagatccggatcgcccaggccgtagatcgccgacaccgaggccaccaccaccacatcacgacgctccagcagcgccttggtcgccgacaaacgcatctgctcgatatgttcgttcaccgaggcatctttctcgataaacgtgtcggagctgggaacgtaggcttccggctggtagtagtcgtagtaggagacgaaatactccaccgcgttttccgggaagaactctttcatctcaccatacagctgcgccgccagcgttttgttcggcgcgagaaccatcgtcggacgctggagatcggcaatgacgttggcaatggtgaaggttttgcccgaaccggtaacccccagcagggtctggtgcgccagcccgtcctccagcccctcttccaggcgacgaatagcctcgggctgatccccggaaggacggaaagcagaattcagtttaaacggtttactcatgggcgacgacctgatgacagaataagcggcaggtgagtaattttactcgttgtggccaggattgccagtaaaaaacactggatgaaaaaccagtagcgtgtcaggatatttagcgtagcgcagagaggattagtgcgttcgcgagccaaatttcgactgtgacaaaataaaacaccagcctcagggggttatccccagaactattacttttttaacatttgtcaagggcggttatgaaagttttatggcaacaggtctcgctggcgttgagggaattgcttttatctaattcgttaaaaaataaagactaatttattaagccgcgtttcgcatcaatttggttgtaacccgcgtattctctcgcttatcgcgggttttctaactctaatgcacaaggttatccacaggaatagtggataactgcctccagcccgtacagcatgcactccagcaaattcccggtttttcccacgaagcggcagtaaaaaatttttatcactcttttttgcctggaaaacgttcattttttcataagcgactggcgagatcttaatcacaattctgtcatttctcgtgcaccacaattcgacatacgcagcaccgggagtgtgcaattcgtataaacgttcagcttttgatagtgagttattcctaaaaatggcctttttttaatcattatgaagttcctggcaggcgttttgcagacatcactctgtgcatcaccccacacatttttaaggagagaaagatgttgagtctgcgtgctgtaaatcagttttacggaagccaacatacgctatggaacgtgaatatcgatttcccgcaaggcatctgtacgggcattgttggcctgcctggcatgggcaaatccacgcttatgaactgcattaccggaaaggtgcccgtcgagagcggcaccatcatctggcatgaggctggcgcgccgccgcataacttgctcaaccctgcgtccgcattcccggcgccgccgacgataggctacgtcccgcaggatcggcgaatattttcccagctcaccgtcgatgaaaatctgcatatcgctatgcgggcgacggggaaacccgacccggcatcaaaaagtgacgtgtatgccctgtttccggagctctatccgctgcgacagagccgtgcctctgcgctgtcccctgacgaccagtatcagctggccctcgccagtgcgctggttaatcgtccgcgcgtgttgattctggatgagcccatgcatggcgcagggcacggtttcgcgcgcaggctggggcagttgctggtgcggttgaatcgggagctgggaatgacggtgctgttagcggagcaacagctgtcgtttatccgccgggtagcggatcgtttctgcatgctctatcgcggacgtaacgtggcacagggccacgttaacgagctggatgacgaccttattgcacactggatggcgcgggacataaggcgctgagatcgagatagcgtccggtttccgcctgctctgcgccgtcggcaagccacgggatctcgccgaggcacggcgcaggcagcacccgcttaagcgtcgccagatactcagcatgacgtttacccggcgctaccacgtcattggcaatccaccctgccagacgcaacccggcctgctgcacggcctgggcggtcagcatggcgtgattgatacagccaagcttcacgccaaccaccagaatgaccggaagctgttcggtctgcacccagtcagcaaatgtctgctcgtcggacagcggggtaaaccagccgccagccccctccaccagcacccagtcggcctgcgtttccaggacgcgtaacccggaagagagcaccgaaaaatcaatcggacgatcttcatcgacgctgacgatgtgcggcgaggtgggttcagcaaaggtataggggttcaccgcagaataggccagcgtaaggctgctgttacgctgtagcgccagcgcatcggtattacgtaagccttccggcgtcatctcgctgccggaggctacgggcttatacccggccgtagttttccccagcagacgcgccgcctgcaacagcgcggcgctggcaaccgttttaccgacttcagtgtccgtaccggtaacaaaataacgttcagtcacgttcaataatcccatgaaaaagatgataagagagcgggaaccggccccgctcctgcggccaggccagctcgagacgctggagttggccgcgggtaaggggcttcttctcccgtccggcgtgcaggtgcgtcgcgcctatgcccttaagcgatcgcatggcgcttaacgcatcgctaaattcgagggtgacggtctggaccacgctgcgatagcgccagcctgccagcgcctgagtgacctgttggtgcgagagaaaccggttggcgtgcggctgcgcatccactgccctccacgcctgattcagctctggcaacgaactttccagcaaggtggtaaaggccaccgctccgccgggccgcgccacgcggtatagctcgcgtagggcctgcggcaggctggcgcaccactgcaccgccagatggctccagacgaggtcaaacagcgcatcctccagcgggatggcctcgatatcggccaccagataacggtctgctgactgctgctggcgggcctcatccagcatctgcgcggataaatccagcgccgtgacgtggctacccgttgcgcgccagtagcggctattgccgccaggcccgcagccagcgtcgagcacctgcgcaaagcgcccctcaccgagcgcggccagcagcccgcgggcgctcaggcgttgcagctcatcgtgctgtgaatagctttgcgctgcccggccaaacgcggcggcaacggcctgtttattgacgggagacatacagtgcctccagaagcgtatcgatatcctgcggctcgtgcgctgccgtgagcgtcagacgcaagcgcgcggtgcctggcggcacggtgggtgggcggatcgccgtgacccactgcccgcgctctcgtagcgcctgtgccnnnnnnnnnnnnnnnnnnnnnnnnnnnnnnnnnnnnnnnnnnnnnnnnnnnnnnnnnnnnnnnnnnnnnnnnnnnnnnnnnnnnnnnnnnnnnnnnnnnnnnnnnnnnnnnnnnnnnnnnnnnnnnnnnnnnnnnnnnnnnnnnnnnnnnnnnnnnnnnnnnnnnnnnnnnnnnnnnnnnnnnnnnnnnnnnnnnnnnnnnnnnnnnnnnnnnnnnnnnnnnnnnnnnnnnnnnnnnnnnnnnnnnnnnnnnnnnnnnnnnnnnnnnnnnnnnnnnnnnnnnnnnnnnnnnnnnnnnnnnnnnnnnnnnnnnnnnnnnnnnnnnnnnnnnnnnnnnnnnnnnnnnnnnnnnnnnnnnnnnnnnnnnnnnnnnnnnnnnnnnnnnnnnnnnnnnnnnnnnnntgtgcgagtcggtaagccggtaaggcagtgcgcttaccccccggcgaaaacgctgaatatggtcggccaggcgcgcccggcgttcagcgccgtcttcgccgcggatcaccgcaagcgacgcagagagcgccacggcctgcgccgggggcatgctggtgctgtagatcaggtgccgggcgaactgcaccaggtaatcggccaccggctcgctgcacaacaccgcggcgccgctgacgccgaagcctttgccgaaggtgaccaccagcagttccggcctgacgcgttgctggtgcgcgcttccgcgcccctcctcgccggtgacgccaatgccgtgggcatcgtcgaccagcagccaggcgttctgctgttttgcgacgtcatgcaaagtggcaagcggcgcgctgtcgccgtccatgctgaataccccttccgtcaccgccagctgaagccctgaacagggtttacccagcaggacgttcagctgagaggcatcgttatgggcaaaacgccgcagctgcgccgggctgagactggccgcttcaagcagggacgcgtggctcaggcggtccgcggtgatgcggtcgtctttgcccatcagggcggtaatcaccgcctgattcgcggcaaaaccggagataaacagcagcgcccgcgggtagcccagccagtcggccagctcttcctccagcgcctgatgcgccgtggtgtagccgctgacgtgcccggagccaccgctgcccacgccgtaacgatccgcgccctgctgccaggcgcgaacgatctgcgggtgctggctcaggcccagataatcgttgctggagaaattacagaaccgctctccttcccgggagagaaaacggcctgcaccgttttccactaccctgcgcacccgaaacgcatccgccgcccgccgctcgtcgagcgcggtcctgatacgtgcctgccaggtcatacggctgccgcgttgtagaactggtcggtgtcggcgttaaaaatctgctgctccagctgctgctgttgctcgttatcccccgcctgtacctcggtctggtgtgggttcagccccagcttgcggaacagctggacatctttgtcctcttccgggtttggcgtggtcagcagtttgcagccgtagaagatggagttggccccggccatgaagcacatcgcctgggtctgctcgctcatctgctcgcgaccggcagagaggcgaacgtaagaggtcggcatcatgatgcgcgccaccgcgatggtgcggatgaaatcgaaggcatccacgtcctcgttatccgccagaggcgtcccttttaccttcaccagcatgttgatgggcacgctttccggcggggtcggcaggtttgccagctgtaacagcaggccggcacgatcttttaccgtctcgcccagtcccacgatcccgccggaacagaccttgatccccgcatcacgcactttatccagcgtgtccagacgctcctgataggtgcgcgtggtgatgatgttgccgtagaactccggcgaagtatcgaggttgtggttgtagtaatccagccccgccgccgagagacgctgcgcctgctcttcgttcagcgtaccaagggtcatgcaggcttcaagccccatcgccttcacccccttcaccatctgctccagatagggcatgtcgcggtcatgcggatttttccacgccgcgcccatgcagaagcgggtcgagccagcgtttttggccttgcgcgcggagtcgagcacctgctcgacttccatcaggcgctcggattcgagaccggttttatagcgcgcgctttgcgggcaatatttgcagtcttccgggcaagccccggttttgatcgacagcagcgtgctgacctgaacatgacgcggatcgaagtgctggcggtgcacctgttgcgcctcaaacatcagctccaggaaaggtttgttgaataattcagtgacttgcgacatcgtccagcgtgcgtggtgagccatcgggcttctccaaagggttttgttaattgtcggttcggtttatacttgtaaacctaaaacttttcaaaatggtttacaagtcgattatgacccaggacgatctcgccttcgacaagcagcatatctggcacccttacacctccacgacccgcccccttcccgtctatccggtagcctcggcccacggctgcgagctgcatcttgccagcggcgagcggcttgttgacgggatgtcctcctggtgggcggcgatccatggctacaaccacccgcgactgaacgcggcgatgaaagcgcagattgaccagatgtcacacgtgatgtttggcgggatcacgcatcagcccgcggtggatttatgccgtcgcctggtagcgatgacgcctgaatcgctggagtgcgttttcctggccgactccggctcggtggccgtggaagtggcgatgaaaatggcgttgcagtactggcatgcgaagggcgaaacgcgccagcggttccttaccttccgcaacggctatcacggcgacactttcggcgcgatgtcggtatgtgatccggacaactccatgcacagcctgtggaaaggctatctgccggaaaacctgtttgcgccagccccgcagagccgcttcgacggcgaatggaacgagatggacatggtgggcttcgcgcggctgatggcggcccatcgtcacgagattgccgccgttattctcgaaccgattgtgcagggcgcgggcggaatgcggatgtaccatcccgagtggctgaagcgcattcggaagatgtgcgaccgcgaagggatcctgttgattgccgatgagatcgccaccggctttggccgcaccgggaaattgttcgcctgtgagcatgcggggatcgcgccggatattctgtgcctggggaaagcgctcaccggcggcaccatgactctctccgccacgcttaccacccgccaggttgccgataccatcagcgacggcgacgcgggctgctttatgcacggcccgacgtttatgggcaacccgctggcctgcgccgtggcaagcgaaagcctcgccattctggaaagcggcgcatggcagacgcaggtggcggcgattgaggcgcagctgaagcagcagttaagcgcggcggcggaggcggaatacgtcgcggacgtccgcgtactgggcgccatcggggtaatcgagacaacgcatccggtgaacatggccgcgttgcagcgcttcttcgttgaccagggcgtgtgggtgcgacctttcggtaagctgatttacctcatgccgccttacagcatttctgcggatcagctccgcaagctgaccggggcagtggttgaagccgttaacacttcagcgcatttcgcgatttaaccccatgcgttacactttctgaatgagtgagtaacgagggaaatcggatgaaaatcatcagtaaagatttgcgcgacggcgaaaagctgccggaacgtcacgtgtttaacgggatgggttatcagggggataatatctctccccatctggcgtgggacgatgtgccagcgggaaccaaaagttttgtcgtgacctgctacgatccggatgcgccaaccgggtcgggctggtggcactggatcgtggcaaacctgcccgccgacacgcgcgtgctgccgcagggctccggttccgatctggttgctctgcctgacggtgcgattcagacgcgcactgactttggcaaagcgggctacggcggcgcggcgccgccaaaaggggaaacgcaccgctatatcttcaccgtgcacgcgctggatgtggacaagattgaggtcgacgaaggggcgagcggcgcgatggtaggctttaacgtgcatttccattcgctgggtagcgcgtcgattacggcgatgtattcgtaatcgtgcgggctgatgccctcaccccggccctctcccacagggagagggagaaaacctaacaattccctctccctgtgggagagggttagggtgagggtaaaaatcacagcaccgaaggtaacagccccaccagccgtccttcctccagaagctgcatcgccttatcaatatccggcgcaaagaagcggtcgtcatcgtagtgcgtaacgtgctcgcgcagttcctggcgcgcctgctccagcagcgggctggattttagcccttcgcgcaaatcaataccctgacacgccgccagccactccaccgccagcacgccgcgggtgttagaggccatctcccacagacgacgcccggcagccggggccatcgaaacgtgatcttcctggttggctgaggttggcaggctgtccacgctgtgcggatgcgacagggctttgttctcgcttgccagtgccgcggcggtgacctgggcgatcatgaagcccgagttcacgccgccgttgcgcaccaggaacggcggcagctgggacatgtgcttatccatcatcagcgcgattcgacgctcagacagcgccccgatttcggcaatcgccagggcgatattatctgcggccatcgccaccggctcggcgtggaagttaccgccagaaaccacctcgttttcctgagcaaataccagtgggttatcggacaccgcattggcttcgaccagcagcacttctgccgcctggcgcagctgcgtcaggcatgcgcccatcacctgcggctggcagcgcagggaatacggatcctgcaccttctcacagttgtgatgcgaatcggcaatgtcgctggtatcggtaagtacgtggcggtacatggcagcggcatcaatctgcccgcgctggccgcgcacctcgtggatgcgggcatcgaacggacgacgcgagccgagcaccgcctcagtggtcagtgcaccgcacaccaccgccgaggcgaacagatcttccgcttcaaacagaccgcgcagcgcgaaagcggtcgacgcctgcgtgccgttgagcagcgccagcccctcttttgccgcgagggtgatcggcgttaagccagcttttttcagcgcctctttcgcaggcagccactccccttgccagcgcgcctggccttcacccagcaggagcagcgacatatgcgctagcggcgccagatcgccggaggcgccgacggagcccttcgccgggatccacggataaacttccgcattgaccagcgccatcagcgcctggatcacgctcagacgaatgccggaaaacccacgcgccaggctgttgattttcaacaccatcatcaggcggacgatctcatcgtccagcggctggccaacccccgccgcgtgcgacagcaccagcgaacgctgtaaattctccagatcgtgcgtggcgatgcgggtctgcgccagcaggccaaacccggtgttgatgccgtaggcggtgcgcccctccgccacaatcgcctccacgcaggccacgctgtcgttaatggcacggtgggcgctttcatcaagggagagtgtcaccggctgacgccagacgtgacgcagctgtttgagcgtcagcgagccgggagtaagtgttaacgcgttcatgcaggctttccttgtgtggcggggatcatcggcaggttcaggccctgctctttggcacaatcaatggcaatctcgtaacccgcatccgcgtgacgcatcacgccggttgccgggtcgttgtgcagcacgcgagcgatacgcgcggccgcttcatcagttccgtcacagacgatgaccatcccggagtgctgggagaagcccatcccgacgccgccgccgtggtgcagcgacacccaggtcgcgccgctggcggtgttcagcagggcattcagcagcggccagtcggagaccgcatccgagccgtcgcgcatggcttcggtttcacggttcggactggcgacagagccggagtccaggtggtcgcggccaatgacgatcggcgcggagacttcgccgctgcgcaccatttcgttaaaggcgaggccgagtttttgccgccactccagcccgacccagcagatacgcgccggcaggccctggaagttaatgcgttcgcgcgccatatccagccagcgatgcaggtgttcgtcgtcggcgacaatctctttcactctggcgtcagttttgtagatatcctccgggtcgccggacagggcaacccagcggaacggcccgatgccgcggcaaaacagaggacgaatataggcgggcacgaagccggggaagtcaaaggcgttattcacccccatctctttcgccatctggcggatgttattcccgtaatcaaaggtcggaatacccatcttactgaaggccagcatcgcggagacgtgttccgccatggcgcgtttggccgccagtaccgtgccctcaggatcggtttccgctttttgctggtagtcttcccacgtccagccttttggcagatagccgtggagcggatcgtgagcgctggtctggtcggtgaccagatccggacgcacgccgcgcgccaccagttccggcagaatatccgccgcgttgccgcacagggcaaccgacacggctttgccttcagcggtgtactttttgatgcgcgccagcgcgtcatcgaggttgtcggcctgctcatcgacatagcgggtacgcagacggaaatcgatgcggctctgctggcactcaatgttcagggagcacgcgcccgccagcgtcgcggccagcggctgcgcgccgcccatgccgcccagtccggcggtgagcacccagcggcctttcagtgatccgttatagtgctgacggcccgcttccacgaaggtttcatacgtgccctgcacaatcccctggctgccgatgtagatccagctacccgcggtcatctggccgtacatggccagcccttttgcgtccagctcgttgaagtgttcccacgtcgcccagtgcggcaccaggttggagttggcaatcagcacgcgaggcgcatttttatgggttttgaatacgcccaccggtttgccggattgcaccagcagcgtttcgtcgttttcgagattcgtcaaagactcgacaatcgcgtcataacacgcccagttgcgcgcggcgcggccaatgccgccgtagaccaccagctcgtggggattttctgctacctcaggatcaaggttgttcatcaacatgcgcagcggtgcttcggtgagccagctttttgcggtgagcgtggtgccgcgcgcggcgcggacatcctgcttgcggtatttatctgacgacattgtgtgttcctcataagggacaggtgatgcatttagatatacttgtatagacaagcacacacaaggtcagatttaacaaaaaagatacaattttgctatattgcgttagcgatcacgcttataaaacttatgacataaagtggccttgcaaccggtagcgattccccgggaatagcagcttcgcatgcgacacaatttgcgaggacgaccaggtacgacggcggatcagcagacagggatcgtgctctttaatacgcaacagctcgcactcctgcggcgtggcgcgcacggcttccacgatatgctccccttccgtcagcggggcgacgagcgagagatacgcatgcggtgtggtttgggtgtaatcctggctcaggtagtccggtatccgctccgcgttgacgcagcggtcttcaatctggaccggaatgtcgttctcataatgcaccatcaccgaatggaaaatccgggtgccctcggtaacgttcagctcgatggcctgttcggcgctggccagcgtctcttcaagcaccagcacctcgcagtggtgctgatggttgcgggcggcaatttcatcggcaatgctgcggatttcaaacagcgccgactgtccttttggctcggcgacaaaggttccgacaccctgcaaacgcaccagcaacccttcatcggtcagttcacgcagtgcgcggttgatggtcattcggctaaagccaaactgcgccaccagctcggcctcggacggaatgcggtcgtgcgggcgccagacgccggcggcgattttttcgctgatcgcctgcttcaccttttcgtaaaaaggcgcgggagggctcggctgcggcaggggcgagcgtgaaaacatcatgactccttgaatgttgttatgcccaccagtgagcaatttgccaggccagtcgggcggcgagcttagcgccctgaccgtcccgatcgtagtgcggattaaattccaccagatccgccgcctgtagtttaccgcttcggcagatacgctcaatcaccgggaacagatccagcgccgggatccccaacgccgcaggggcggacacggcgggcatttctgcggcaggcagcacatcaaggtcaacggtgagataaacccggtctgcctgcgcaagcacgctatccagcgcggatagcgcatcccggcgaaaatcgagatcttcaaccagcgtcacgttcaaccgctcagcttcctcccacagcgcctgagtattcgccgcacggcttacccccaggcaggcgtagtgaaacacccgcgactgagacgcgcagtagtgcgccagctggcggaacggcgtgccggacgttgcccgttcggccttgcgtaaatcgaggtgcgcatccaggttgatcaccgcaaggcgatcgttcggaaaggcgtccagcacgccgcgcccgtgcgcccaggcggtttcatgtccaccgccgaaaaccagagtacgcatcccggattgctggcacgcggttatggcctcgctcagcgcctgctgtgccgcctccagcgcgtggccttcaacataaatagcgcccatatccacgaggcgcgcatgaccctgatggctcgccatattcgccagcgcgccacgcaacacatcgggcgcctgtgcagcaccgggcctgccctggttacgcttaaccccttcatcacattcaaagcccagcagggcgatgcctgacggcgcgggagaaaagtgttcgcgctgctgtatggtctggaagagacgtttcgcggtgctggactcggcgctgtcgtcacgaccctgccagacctgcggagagacgggatgccacagtttcatgctacctgcccccgaaacacgcgttgatacataggattccgccccggctcgtaaaccatctcaaccggatgattcgcctcccagacgacgaaatcagccacataaccgggctttaactgcccgtgcgtcgcaccacgtcctagcgcctgcgccgcatgccgcgtcacgccagcccaggcctcttccggcgtgaggccaaactggacgcaggccatgttcattgccagatgcaggctggcaaacgggctggtgcccggattgtagtcggtagccaccgccatcggcacgccctgctctctcagctgcgccaccggtggacgctggcgctcctgaagaaaatagaacgcgccggggagcaataccgccaccgtgccgctttgcgccatcgcctgaatacctgcatcatcgagatactcaatatgatcggccgacagccctttatactggctgaccagcgccgcgccgccgagattcgacagttgttctacatgcccttttaccgggatcccgagcgcggcggcggcccggaacaggcgctcggtttgcgccggggtaaagccgacgttttcacaaaacacgtccaccgcttcaaataactctttttgccacagcgtgggcatgatctgctcacagaccagcgccagataggcatccggatcctgtcggtactcggcaggaacggcgtgcgcggccagcagcgtcgggctgatatcgaccagattattcaggctgagctggcgggcaaccagcagcattttctcttcggcttcggcattcagtccgtatcctgatttgatttcaacggtcgttacgccttcattcatcagccgctggagtcgctgctgcgccaccgtcaggagcgtttccggcgaactgttgcgggtggccgtgaccgtggcgttaattccgccgccctgcgcgctaatggtctgatatgacacgccgttaagccgttgctcccattccgctgcgcgatcgccgccgaacaccagatgggtgtggcaatcgatcaggccgggggtaaccagacgcccgtcgagatcgacacactgacgatgcccggaggggatctcggattcaggaataatggccagaatcgtctggccgcgcacaacgagggcatgttgttctctcaggccgtagggctccgcctcacctgtcgccagggttgccagtcgcgcatttcgccatatcacatcatcgggatgaagctgctgcatgtgccttccacttgtcatgggttgtatagacatttattttcatctgccgcctgctgtcaaccgcattgggggaaaatgttatttatttgtgatgactttcccgtcgcctgcgggcaaaaatgcaacttttccggtttttatcttcccgtttcgctcaacttagtataaaaaagcaggctatttcgtctatccagataagacttgcatacccaggagcattaccttgaatatttccaggatttcccgtctggcgttggcactcgcctttggcgtgactttatccgcttgcagttcaacaccaccggatcagcaaccttctgagcaggttgctccgggcaccgcttcccgtccgatcctgtcagcggctgaagcgaagaacttcacccgtgcgcactatttctcggcgatggatcccaatgcagccccgtggacgccttcttctattaacctgccgaaacagccagacttcgttgtcggcccggccggggcagagggcgttacacacacctctattcaggcagccgttgatgccgcaattaccaaacacagcgcatctcgtcagtacattgccatcctgccgggtgaatacgaaggaaccgtttatgttccggcggcaccgggaagcattacgctttacggcctgggcgaaaaagcggtcgacgtaaaaattggcctggcgattgattcagagatcgacagcagcacctggcgccatctggtgaacccggccggtaaatacatgccaggtaaaccggcgtggtatatgtttgataactgccagcgcaagcgtgccgccaccattggcgtgatgtgttcggcggtattctggtcacagaacaatggcctgcaattgcagaacctgaccattcagaacaccctgggcgacagcgttgacgcaggtaatcatcaggccgtggcgctgcgtagcgatggcgacaaggtacagattaacaacgtcaatatcctgggccgccagaacaccttcttcgtgaccaacagcggcgtgcagaatacccttcagaacaaccgtctgacgcgtactctggtcaccaacagctacattgaaggcgacgtggatatggtctctggccgcggcgcggtggtatttgataacaccgactttcgcgtggtgaattcacgtacgcagcaggaaggttacgtctttgccccggccacgcagtctaacctgttctatggcttcctggccgtgaatagccgctttactgctgctggcgatggcgtggcgcagcttggtcgctcgctggacgtggactccgccactaacggccaggtcgtgatccgcgacagcgtgattaacgaaggctttaacatggcaaaaccgtgggcggatgcggcgatctcgaaacgtcctttctccggcaacaccggcacggtggatgataaagacaacgtgcagcgtaacctgaacgacgctaactttaaccgcatgtgggaatacaacaaccgcggtctgggtagtaaagtggttgctgagccgaagcagtaaaatgcctgctgccgggtggcggctgcgccttacccggcctacctcatgcattaaccgcgcataaaaaaacctcgcatttgcgaggtttttttcgtctacggatcaatgagcgttaatcacaacccacatcggcccttgtccgaccgcatagcgtcctttctcttccagtagaccctgcacgccctggatttcatagagcgcaatgtggtgggatttctgccccgccgcaatcaggtatttgccgctgtgatcgacattaaagccgcgcggctgggtttctgtcggctggaagccttcaacggccagaacgctgccgtcttcagagacgctgaagatggtgatcagactggaggtacggtcacaggcatacaggtgacggccatccggcgtaatgtgaatgtctgccgcccagcgtgtgtcggagaaatcagatggcatcatgtccagcgtctgtacgcactcgatctgtccgttaggatcgttcagctcccacacgtctaccgagctgttcagctcgttaacgacataggcatactgctgattcggatggaagaccatgtggcgcgggcctgcgccttccacggtggtgacttccgccgggctctgcgcgaccagatggccgtcatcgctcagggtgaacaggcagatgcggtcctgcttaagcgctggcacccacagcgtgcggttatccggcgaaatgttggcggagtggcaaccttcgagcccttctaccacgtcgacggtttcaacgggaataccgtcttccaggcgggtgacgctcacgcagcctgcattgtaggagccgctgaagataaagttgcctttatggtcagtggaaatatgggtcgggctgcccggcagcggggcttctgcggtataggtcagcgcgccgtcatccggggagatacggtatgccagtacgcggaattccgggcgtacgccgacataaagaaaacgtttatccgggctgacgaccatcggctgcacctggcctggcacatcaacaacctgaaccagcgtaagcgaaccttctgtattcaaacgccagacatggatctgctgactttcaggactggcggtataaacggtttgtttcatgaatactcctgattatttttaacggtgaatgctgaattgtagtccgggattttgcagggttccgctctcggtgtaccatcccgacagaccttaaattcaacattaacccggaagaaaaaatgacctcgcgagtgattgccctggatttagacggaacactgcttacccctcagaaaaccctgctcccctcttctcttgaggccctcaaaagagcccaggaagcggggtatcaacttctcatcgtaacgggtcgacatcacgtagccattcatcctttttatcaggcactgggcttagatacacctgcaatttgttgtaatggcacctatttgtatgattatcaggcaaaaaaggttttagcctccgatccgcttcccgttacgcaggcgctgcaattgattgatttactggatgagcatgccattcacggcctgatgtatgtggacaacgccatggtgtatgaacgccctaccggccatgtgatccgcaccagcaactgggctctgtctctgccggaagcgcagcgtccggtgttcactcaggtttcctccctgcgccaggcggcggaagacgtcgacgcaatctggaaatttgccctgaccgatgaagacaccgccaaactgaataccttcgcaaaacatgtcgagcatacgctgggtctggaatgtgaatggtcctggcacgatcaggtggatatcgcccgcaaaggcaacagcaaaggaaagcgtctgacccagttcgtcgaatcgcagggcggatcaatgcaggacgtaattgccttcggcgataactataacgacatcagcatgctggaagcgtccggaacgggcgtggcgatgggtaatgccgatgacgcggtgaaagcgcgcgctgacgtggtgattggcgataacaccaccgacagcatcgcgcagtatatttatacccacctgctgtaatcaggcggttatagaaacgctcttgatttgcgcgtaaagccacaggccaggcttgatgcctagctcatccctggcccacgggctgatgcgcgcccacagcgttctgttgcctacttccagctgcacttccacctggccgttatcatcaaaacactgcgccacttttgcgcgcaaaatattgcggatactggtttgcagcggcggttgcaggaccagggagacatccgacgcctgaatgcggatccgtaacgtggactgaatcggcgtatcgattttattcacccacaaatgctgatcgcccagcgccagcgcagtcatcgcgtagtgcggatggtgctccagcacgctcaccttcagaatgctgctctgctgctcctttggcagccatggatgcataacgctgctgccccacacctcctccagattgnnnnnnnnnnnnnnnnnnnnnnnnnnnnnnnnnnnnnnnnnnnnnnnnnnnnnnnnnnnnnnnnnnnnnnnnnnnnnnnnnnnnnnnnnnnnnnnnnnnnnnnnnnnnnnnnnnnnnnnnnnnnnnnnnnnnnnnnnnnnnnnnnnnnnnnnnnnnnnnnnnnnnnnnnnnnnnnnnnnnnnnnnnnnnnnnnnnnnnnnnnnnnnnnnnnnnnnnnnnnnnnnnnnnnnnnnnnnnnnnnnnnnnnnnnnnnnnnnnnnnnnnnnnnnnnnnnnnnnnnnnnnnnnnnnnnnatgccttcaccctgcccgcttccagcaccagcactttgtcggccagatgtaagatctcatccagcgaatggctgacgtagagcatgggcacgttgatttcccgcgccagacgttgcagatacggcagcagctcgcgcttgcgcggaatatccagcgaggccagcggctcatccagcagcaacagttccggcgcggttaacagggcgcggccaatcgccacgcgctgtttttcaccacccgacagcgacgacggcagacgatccaacagcggttcgatgcccagcagcgccaccagcttatcgaactgtccggccatgctttttgccatgccgtaacgcaggttcccgcgtacgctgtagtgcgggaacaggcgcgcatcctgaaacacatagccgatgcgacgtttgtccggtgacaggcagaccttcttctccgcgtcattcaagacgcggttatttaacacaatacggccagactggggacgcgtcaggccgctaatcgcattaatcagcgacgttttccccgccccggacacgccaaaaatggcggtgataccgctggcaggcagcgtttcgttcagcgtcagcgtgtggctgcccagggtttgcgtaaagttgagttccagcatcacggtttccccatccgttcacggctgaggcgcgccagccactcagacaccagcagcgagaccagagcgagcacaattgaaataatacacagccgggccgccgcaccttcgccgcctggggtctgaatcagggtatacatggccgacgggatggtccgcgtctcgccgggaatgttcgacacaaaggtgatggtcgcgccaaactcacccagcgagcgggcgaaggctaacaccgtaccgacgataatgcccggtaacgtcagcggaagcgtaatggtcaggaatacccgccagcggcctgcgcccagcgtgcgggcggcctgttctaaccgagtatccaccccttccagcgccagacggatagcgcgcaccatcagcgggaaggacatcaccgccgcggccagaaccgcgccgcgccagctgaaagcaaaggtcaggccgaaccagtcgtacagccattcgccgataaagccgcgtcgacccatggagatcagcagcagatatccgaccaccacaggcggtaagacaagcggaagatggagaacactgtcgagcagggctttgcctggaaacttcacgcgaaccagtaaccaggcaaagaacaccccaaagggcaaactcagcgcaaccgccagggaagagactttcaggctcagcagcacggcctgccattcaggttcggtcaatatcattcgtgagtcgtaaatccgtaacgtttaaagatcgcggacgcttccggccccttcaggtagtcaacgaaggccgtcacgctcgcatttttatgtccatcaactatcgcaacaggatattccactttcttatgcgagtcttccgggaaggtgcctaccaccttcacacctttactggcgacggcatcggagccgtaaacgatcccgagtggcgcttcgttacgctccaccagcgccagcgcgccacgcacatcttctgcgggagccagcttcggcgataaggtctcccacgcgcccagtttttgtagcgcttctttcgcataaatcccggcaggaacatgctccggatcgcctaccgccagacggccaccgttgagcagccgggtccagtccgtctgtttgttgatggcgatgtcgtcctgcttgctgtttgcgggcgcgaccaccaccaggctatttcccagcagcgtttcgcgggtagccgtatcaacagcttttttctccaccgcgtaatccatccatttctgatcggcagagatgaacagatccgcgggcgcccccgcttcaatctggcgggccagcgtggatgaggaggcaaacgacgagaccacctcgacgtttttctcttttttgtataccgcagcaatatcctgcatcgcgttagtcagcgacgccgccgcaaagaccgtgatttttccttcatccgccagcgcgtggccggtgagtgagagagtcagcgttgcccctgcgaaaaggcgtacccatgaacgtgccatttgaagctcctgtgcgtgtcgttatatacaaataaatataacgacatatcgcaggcgttcctagcgctaaatcgtacccattaatgcgtaaactcaaggaacgttgtaaaagatatcggcgggagaggaataaacttgagagcaaaacgcccgggctggccgggcgttttggaggaaatcattgctgctttttaggctggtcacgacgatgaccaatgttcgaaaagacgttgaacacttcacccaggccgtagatggcaccgaggatgatagccatcactactggcaccatgattaccgcgaataccagacttttcaacaactctaacatggttttctccagatcttgtgaaggcttattctaccctgaaaagtaagaaaaacatccccttttgtgcggtgcgctttccgcccccgggcatttgggtcacaatagcctttttaccgggacactgttatgcaggccgaaattctcctcaccctacgacttcagcagaagcttttcgccgatccgcgacgcatcgccctgttaaaacaaatagaacaaactggctcgattagccagggcgccaaaaacgccggtatcagctataaaagcgcctgggatgcgattaacgacatgaacaccctgagcgaacacacgctggttgagcgcgccaccggcgggaaaggcggcggcggcgccgtgttgacgcgttacgggcaacgtctgatccagctctacgatttactggcgcagatccagcaaaaagcatttgatgtgctgagcgatgacgacaacctgccgctggacagcctgctgggcgccatctcccgtttctctttgcagaccagcgcccgcaaccagtggtttggtacggtgacggggcgcgatcattcgcaggtgcaggagcatatagagattctgctcgcggacggtacgacgcgcctgaaagccgccatcaccgcgcaaagtggtcaacgccttgggctgaacgaaggtcaggaggtgctggtattacttaaagcgccctggatcagcatcgcactcaaccctgagcaggccgcagaggccgacaaccagctacgcgggcgtatcagccacatcgagcgcggcgcagaacaatgtgaagtgctgatgaccctgccggatggacagttgctctgcgccaccgttccggtgaacgacgcgaccgaattagacgaaggtgctgtggtgaccgcatatttcaatgcagacagggtaattatcgccacattgtgctaagcgcattgacaactctgcttacactgagtatccctgacatctgttgctgcaaaaaatgggataacacatgtcatcattgcatatttcgcaaggcacgtttcatcttagtgatatccgtaccttatcgctgccagagttaacccttcgcgccggagaaagctgggcgtttgtgggcacgaatggcagcggaaaatccgcgctggcccgcgctctggcaggcgaattaacccaactgaagggtgaacgtcggtgcacctttacccggctgacgcgcctttccttcgaacagctgcaaaagctggtcagcgatgagtggcagcgtaacaataccgatttgctcagccccggcgaagaagataccggccgcacgacggcggaaattatccaggatgagataaaagatcctgcccgctgtcagcagctggcggagcaatttggcattaccgccctgcttaatcgccgctttaaatacctttcaaccggtgaaacgcgcaaaacgctgctgtgtcaggcgctgatgagcgagccggaactcctgatcctggatgaaccgtttgacggactggatgtgcagtcccgcgcgcaactggcagcgttgctggcgtcgcttaaccagcagggatacacgcttgtgctggttcttaaccgctttgatgagatcccggatttcgtacattatgcgggcgtgctggcggactgtagcctgaccgaaaccggcgagaaagccgtactgcttcggcaggcgctgattgcgcagctggcgcacagcgagaaactggacggtattgccctgccggagccggatgcgccttcagcacgccacgggctggagcctgaccagccgcgcattgtgctgcgcgatggggtggttgcttacgacgatcgccctattcttaatcacctcagctggacggttaatcctggtgagcactggcagatcgtcggccccaacggggcgggtaaatccacgctgctgagcctgatcaccggggatcacccgcagggatacagcaacgatctcaccctgttcggccgtcgccgcggcagcggggaaaccatctgggatatcaaaaagcacatcggctatgtcagcagcagcctgcacctggactaccgggtgagcaccacggtgcgaaacgtgatcctctctggcttcttcgactccattggtatttatcaggcggtatccgacaagcagcacaagctggcgcagcagtggctggatattctgggtatggataaccgggtcgccgatgcgccattccacagcctgtcgtgggggcagcagcggctggcattgatcgtccgcgcgctggtcaagcaccctacgctgctgattcttgacgaaccgttgcaggggctggatccgctcaaccgtcagctgatccgccgctttgtggatgtcctgattagcgaaggtgaaacccagctgctgtttgtgtcccaccatgctgaagatgccccgtcctgcatcacccatcggctggaatttgtccctgacggcgagcaataccgctacctgctgagcaaaatcgattaacacatggagggcgctgccctccgcttttcagacaacctgcaacaatacatctctatctctttgatctacaatgcactcagtctgtgaaaaagcgcgtgtgaaaaccagtgtaaacgataccactattttatcccatgtcacacttttcgcgtctctgatatgctatggttaattcataccataagcctaatggagcgaaatatgcgagttctggtaacaggtggtagcggttacataggaagtcatacctgtgtgcaactgctgcaaagcggccacgatgtcgtcattcttgataacctgtgcaacagtaagcgcagcgtgctgccggtcattgaacgcctttcgggtaaacagccgactttcgtggaaggcgacatccgcaatgaagcgttgatgactgaaatccttcacgatcacgcgattgaaaccgttatccacttcgcgggcctgaaagcggttggcgaatcggtggcaaaaccgcttgagtactatgacaacaacgttaacggtaccctgcgtctgatctccgccatgcgagcggccaacgttaaaaattttatcttcagctcctccgcgaccgtctacggcgatcagccaaaaattccttacgttgaaagcttcccgaccggtacgccgcaaagcccgtatggcaaaagcaagctgatggtagagcagatcctgaccgacctgcaaaaagcccagcctgagtggagcatcgcattgctgcgctacttcaacccggttggcgcgcatccgtcaggggatatgggcgaagatccgcagggcattcctaataacctgatgccgtatatcgcgcaggttgccgtagggcgccgcgattccctggcgatttttggtaacgattatcccaccgaagatggcaccggcgtgcgcgattacattcacgtcatggatctggccgacggccacgtggcggcgatgcagcagctggcggataaaccgggcgtgcatatttacaacctcggcgccgggatcggcagcagcgtgctggacgtggtgaatgccttcagtaaagcctgcggcaagccggtgaagtatcacttcgctccccgccgtgatggcgacctcccggcttactgggccgatgccaccaaagcggataaagagcttaactggcgtgtcacccgcacgcttgatgaaatggcacaggatacctggcactggcagtcacgccatccgcagggttatccggattaaggatttgtcatgacgcaattcaatcccgtcgatcacccgcatcgtcgttttaacccgctcagcgggcaatggattttagtttcaccgcatcgcgccaagcgcccctggcagggggcgcaagagacgcctgccaaacagacgctgccgcagcatgatccggactgtttcctctgcccgggcaatacgcgcgtgacgggcgnnnnnnnnnnnnnnnnnnnnnnnnnnnnnnnnnnnnnnnnnnnnnnnnnnnnnnnnnnnnnnnnnnnnnnnnnnnnnnnnnnnnnnnnnnnnnnnnnnnnnnnnnnnnnnnnnnnnnnnnnnnnnnnnnnnnnnnnnnnnnnnnnnnnnnnnnnnnnnnnnnnnnnnnnnnnnnnnnnnnnnnnnnnnnnnnnnnnnnnnnnnnnnnnnnnnnnnnnnnnnnnnnnnnnnnnnnnnnnnnnnnnnnnnnnnnnnnnnnnnnnnnnnnnnnnnnnnnnnnnnnnnnnnnnnnnnnnnnnnnnnnnnnnnnnnnnnnnnnnnnnnnnnnnnnnnnnnnnnnnnnnnnnnnnnnnnnnnnnnnnnnnnnnnnnnnnnnnnnnnnnnnnnnnnnnnnnnnnnnnnnnnnnnnnnnnnnnnnnnnnnnnnnnnnnnnnnnnnnnnnnnnnnnnnnnnnnnnnnnnnnnnnnnnnnnnnnnnnnnnnnnnnnnnnnnnnnnnnnnnnnnnnnnnnnnnnnnnnnnnnnnnnnnnnnnnnnnnnnnnnnnnnnnnnnnnnnnnnnnnnnnnnnnnnnnnnnnnnnnngccgcgctgatgaccgatacgccagacgcgccggaaagccatgacccgctgatgcgctgcgaaagcgcccgcggcaccagccgcgtgatctgcttctcgcccgatcacagcaaaacgctgccggagctgagcgtggaggccctgaaagaggtggtcagcacctggcaggcgcaaaccgcggagctggggcagagctatccctgggtgcaggtgttcgaaaacaaaggcgcggcgatgggctgctccaacccgcatccgcacggtcagatctgggcgaacagcttcctgccgaatgaagccgagcgtgaggaccgactgcaaaaagcgtatttcgcccagaacggttcgccgatgctggtggattacacccagcgtgagctggcggatggcagccgtaccgtggtggaaaccgagcactggcttgcggtggtcccttactgggcggcgtggccgtttgagacgctgctgctgccgaaagcccatgttcagcgcattacggacctcagcggcgcccagcgagacgaccttgcgctggcgctgaaaaaactgaccagccgctacgacaacctcttccagtgctccttcccctactccatgggctggcacggcgcgccgtttaacggcgaagagaatcaacactggcagttacatgcacacttctacccgccgctgctgcgttctgcgacggtacgtaaattcatggtgggctatgaaatgctggcggaaacccagcgcgacctgacggcggaacaggcggcagaacgtctgcgtgccgttagcgacgtccattaccgcgaatcaggagtctaaaaatgagtctgaaagataaaacacaatccctgtttgctgaaaaatttggctaccctgccacccatgttatccaggcgccaggccgcgttaatctgatcggcgagcacaccgactataacgacggttttgtcctgccgtgtgccatcgactaccagacggtgatcagctgcgcgaaacgcgacgatcgtcaggtgagagtgatggccgcggattacggcaacgaaattgacgaattttccctcgatgcgccgatcgtgacccacgacagccagcagtggtcgaactatgttcgcggcgtggtgaagcacctgcaaaagcgtaacaagaatttcggcggggccgatctggtgatcagcggcaacgtgccgcagggggcgggattaagctcttccgcatcgctggaagtggcggtcggcaccgtgttccagcagctttatcatctgccgctggacggggcgcaaatcgccctcaacggtcaggaagcggaaaaccagttcgtaggctgcaactgcggcattatggatcagctgatttccgcgctgggcaagaaagaacacgctttgctgattgactgccgctccctcgggaccaaagcggttccactgcctaaaggggcggctgtggtgatcatcaacagcaacttcaaacgcaccctggtgggcagcgagtacaacacccgtcgcgaacagtgcgaaaccggcgcgcgcttcttccagcagccagccctgcgtgatgtctcacttgatgaatttaacaaggttgcccacgagctggacccggttgtcacgaagcgcgtgcgtcatatactgacggaaaatgcccgtaccgtagaagccgcctccgcgctggcaaaaggtgacctgaagcggatgggcgagctgatggccgaatcgcattcctccatgcgtgacgatttcgaaatcaccgtgccgcaaatcgacaccctggttgaaattgtgaaagccacgattggcgacaaaggcggcgtgcgtatgaccggcggcggatttggcgggtgcgtcgtcgccctggtgccggaagagctggtccctgccattcaggacgcggtggcaaaacagtacgaagccaaaacgggcatcaaagaaactttctatgtctgcaaagcatcacaaggagccggacagtgctaaacgaaacaccaacactcgcaccggatggtctgccgtatcgcctgttaaccctgcgcaacagcgccgggatggtggttacgctgatggactggggcgcaacgttactttctgcccgcgtaccgatgcctgacggcagcgtgcgcgaaaccctgcttggctgcgcatcgccggagcagtatatcgagcagaccgcttttctgggcgcatccataggccgctacgctaaccgcatcgccagaagccagtttacgctggacggcgtaacgtattccctgcttgccagccagggcgaaaatcagctgcacggcggcccggaagggtttgataaacgtcgctggaagattgtgcagcaaaatgacggtgaggtctggttctctctggactccctcgatggagaccagggcttcccgggcaatctcaccgcaaccgcgcgcttcaccctgaccgaagataatcgcatcgccattgagtatcgcgcgaccgtcgataagccgtgcccggtcaatctgactaaccacgcctatttcaaccttgacggtaatcagaccgatgtccgcagccacaaactccagatcctggcggacgagtatctcccggtcgatgagatgggtatcccttatcaggcgctgaaaccggtaagcggaaatagctttgatttccgtcagccgaaaaccattgctcaggatttcctgagtgatgacgatcagcgcaaggtgaaaggctacgaccacgcgttcctgttgcaggcaaaaggcgatctttctcaacctgccgcacaggtctggtctgctgatgagaagttacagatgacggtctacaccaccgcccccgccctacagttctactccggtaactatctggagggtaccacggcgcgtgaacatgacgcctacggcgcctggcaaggactggcgctggagagcgagttcctgccggacacgcctaaccatcctgaatggccgcagccggactgcgtgctacgtccgggtgaagagtacgtaagcgtcaccgagtatcatttcattccgcgcgcttaatgtccggcggcgcacgggcctacgaatataggcctgataagcgaagcgccatccggcaaaaaagactggccctcatcgcgagggcttttttatctccgccttgctgaaaatagcggcgatcgcagacaaaatcataaccctggattcacatgcatcttacactctcgaactattttcgctatggttagggttaagcgttgctgctggcacagtcacggcaatataatgagaattgttatcattcaaaaatgcttgaggagtaagaaatggctaatactaagcttgtcctggtgcgccacggcgaaagccagtggaacaacgaaaaccgcttcaccggttggtatgacgttgatctgtccgagaaaggcgtgagcgaagcaaaagcggcaggtaaactgctgaaagaagaaggcttcacctttgactttgcttacacctctgtgctgaaacgtgccatccataccctgtggaacgttctggacgagctggatcaggcctggctgccggttgagaaatcctggaaactgaacgagcgtcactacggtgcgctgcaaggtctgaacaaagcggaaaccgcagaaaaatacggtgacgagcaggttaagcagtggcgtcgtggttttgcggtcacgcctccagagctgagcaaagatgacgagcgctacccgggccacgatccgcgttacgcgaagctgactgaggctgaactgccgcagaccgaaagcctggcgctgaccatcgaccgcgttgtgccttactggaacgaaaccattctgccacgcctgaaaagcggcgagcgcgtcattatcgctgctcacggtaactccctgcgtgcgctggtgaaatacctggacaacatgggtgaagatgaaatcctcgagctgaatatccctaccggcgtgccgctggtgtacgagttcgacgaaaacttcaagccagttaaacattactacctgggtaacgccgacgaaatcgctgcaaaagcggcggccgtggcgaaccagggtaaagcgaagtaatattcgccggacataaaaaaagcgtggagcaatccacgcttttttattgcccgggacaaacttagccgcgacgcgctttaaccgcatccgccaactgacgcaggatcgcatcggtatcgtcccagccaatgcaggcatccgtcacgctcttaccgtagaccagcggctcactgccctccaggttctggttgccttccaccagatggctctcaatcatcaccccaatcactgcgcgttcaccgctggcgatttgctgacacacatctgcgccgacttccatctgctttttaaactgtttgctggagttggcatggctgaaatcgatcatcacctgcggtgccagacccgctttctccagccctgcttttacctccgctacgtgtttagcactgtagttaggctctttaccgccgcgcagtatgatatggcaatcgccattaccgctggtattcacgatagcggagtggccccacttggtcaccgacaggaagcagtgcggcgcgcccgccgcattaatggcgtcaatagcgactttaatggtgccatcagtgccatttttgaaccccaccgggcatgacaggccagacgccagctcacggtgaacctgagattccgtcgtacgcgcgccaatagcgccccagctcatcaggtcagccagatactgcggggtgatcatatcgaggaattctccggcagcaggcagcccgctgtcgttgatctccagcagcagcttacgcgcaatgcgcaggccgtcgttgatctggaaactgttgtccatatgcggatcgttgatcaaccctttccagcccacggtggtacgcggtttttcgaaataaacgcgcatcacgatttccagttcgcctttcagctcttcacgcagggcgagcagacgggacgcatactctttggccgcagcaggatcgtgaatggagcacggcccaatgaccaccagaagacgatcgtcgctacctttcaggatcttgtggatcgccttgcgggcatgagacaccgtgttggcggcattttcggtggcggggaatttttcaaggagcgctacgggaggtaataactcattgatctctttaatgcgtaaatcgtcgttctgataattcatcttctttccggctctgccatatctttagtaatgaaagcaatcctttcaatctaacttgtcggccacgaagtgtaaacgggcttttacacttcgcgcagataattcctggaattcgcctaaaatacacaacaaaatagcgaaaaatgagatctggcctaagctttttacttgtaacgactgtttttaaatatttatacgcgattccatcctgacataaatcaggaaactgggatctttcgccactgaacaagatgcactgttggagaatgttatccagcgtaacgataagaacaggagcaccatgatgaaaatgacgaaactgactacgcttttcctgacggcaacccttactctggcaagcggtagcgtactggctgctgacgcaggctcatccggcagcaacggcgacgcgaatgccgctgccgaagcgggccaggttgcgccggatnnnnnnnnnnnnnnnnnnnnnnnnnnnnnnnnnnnnnnnnnnnnnnnnnnnnnnnnnnnnnnnnnnnnnnnnnnnnnnnnnnnnnnnnnnnnnnnnnnnnnnnnnnnnnnnnnnnnnnnnnnnnnnnnnnnnnnnnnnnnnnnnnnnnnnnnnnnnnnnnnnnnnnnnnnnnnnnnnnnnnnnnnnnnnnnnnnnnnnnnnnnnnnnnnnnnnnnnnnnnnnnnnnnnnnnnnnnnnnnnnnnnnnnnnnnnnnnnnnnnnnnnnnnnnnnnnnnnnnnnnnnnnnnnnnnnnnnnnnnnnnnnnnnnnnnnnnnnnncgatgaaccatgagggtatgaccaccgacgaggttcataaaaactctgtgtgtaaagacgggaaatgcccggacccgaatgacaaagtaggcagcgatgccaataccaaaacggacggtactacccagtaaccttccgtaaggtaaaacagggagagcgaatgctctccttttttatttaagctcttaaaaacgctacactaaaaataataataaatcaggaacgataccatggcgcactcccactcccattcccactccactggcgatgaaaatgccaaacggcttctgctggcttttggcgtcactgccacctttatgataattgaggtaacaggcgggctgatatccggatcgctggcgctgctggccgatgccgggcatatgctgaccgacgctgccgcgctcctgtttgctctgctggccgtgcagtttgcccgtcgccctcccaatactcgccacacctttggctggctcagactgaccacgcttgccgcctttgtgaatgcgattgcactggtggtcattactcttcttatcgtctgggaggcttttcagcgctttcggcatccacaaccgatagccgggacgacaatgatggttatcgccattgccgggttggtcgccaatattctggcgttctggatattgcaccgcggcagcagtgaaaaaaatctgaacgtacgggccgcggcgcttcatgtgctgggcgatctgctgggttccgtaggggccatcgtagccgcgctgatcattatgggcacgggctggactcccatcgacccgattctttccgtgctggtatcgtgccttgtattacgcagtgcctggcggctgttgaaagagagcgtcaatgagctgctggaaggcgctcccacgtcgctggatattggcgagctaaaacgcaatctgtgtcgttccattcctgaagtccgtaacgttcaccacgttcacgtctggctggtgggtgagaaaccgcttatgacgctgcacgttcaggttattccgccccacgatcacgatgcgttgcttgaacgtattcggcacttccttgagcatcactacgaaattgcgcacgccaccatccagatggagtatcagccatgtaacgggccagactgtcacctgaacgaggcgcagtccggccactcacacgcccatcaccattaacgggaaagcgcgcgcgagccacgctcacgcgcgctgttaatccacatgcgactgccgttcagggcaatgaccgtcagcagcatgtactccagcgacatggcataaacaccctggcgggcaaaaatcaccacgctaatgacgttgataaccacccacagcagccagttctcaacgtatttacgggtcatcaggatcattgcggcaatcgacaacaccatcatgcaggaatcccagaacgggaaggcatccggctgaagctcaggcatcgtcacatttaatcccagacccgacatgaccgagaccgccacgcgcgtcaggaaggcaaataccggatcaataaagacggtcataaagccgatagccaccacgcaggccgcgaaccaggcgatggcttttggcaacggcagccagcggatttgcagttccgcctcctgctgactgttttgccgagaccaggcgtaccagccatagatattggctgcgaagaagaacagctgtagaagcaggctggcgtagagctggatctggaaaaagatgatcgcaaacagcgtgacgtttatcagcccgaacgcatagttgctgatcttctcaaggctggccagccagatacagagtaaaccggccagcgtacccaccgcttcaatccacgacaggtcatagccgctcgcaccaatcgggatatgaaccaggatgttctgtgtgctaaaaaaatccattttttctccggggcgtaataagttaagtacgtagtgtagccgcaaaatccagcatacggttaagtggaattaacgcgccttcacgcagagcggcatccacgtggatctcatgcgcttcgccaccgttctccagcccctccgcaatcgctttgagcccattcatcgccatccacgggcaatgcgcgcagcttcggcaggtcgccccttctccggcggtcggcgcttcgagcaacgttttttccggcacggcctgctgcatcttgtagaagataccgcgatcggtcgccacaatgagctgcttgtgtgacagggttttcgcagcatgaatgagctggctggttgacccgacggcatccgccatgtcgacgatggactgcggggattccgggtgcaccagaatcgcggcgtccgggtataatcctctcatgcgcgtcagggcctgggtcttaaactcgtcgtgaacgatacaggcgccctgccagcacagcacatccgcaccggtttgtttttgtacatagtttcccaggtgacgatcgggcgcccagatgattttctcccccaggctgtccagatgctcaatcagctcaacggcgatactagaggtcactacccagtctgcccgggctttcaccgccgcagacgtgttggcatagaccaccacggtacgatcagggtgggcatcacagaaggcggtgaactcatcaatcgggcaaccgaggtcaagggagcattcggcattcagcgtcggcatcagtatggttttttccgggctgagaatttttgccgtttcgcccatgaagcgcacacctgcaaccagcagcgtggaggcaggatgttttgcaccgaaacgcgccatttccagggaatctgagatacagccgcccgtctcttctgccagctgctgaatttccgggtcggtgtagtaatgcgccaccatcaccgcatcacgctctttaagcaggcgcttgattttttcaagatagaactgtttttcatcccggcttagcggagcgggcttcggcgggaagggatagattgcggtttcgggatcaaacatcacgctcattatggcttctcgttttactggcttaacaatattgcctttgttttgcatgagataacaaaaatgaggcaatggtgttttgtatactaaacaagatagcgaatttgagggggaatgtcatcgggaattgatgccggtagcatctgtcgggtggcggcttcgccttacccgacctacaaggcactggcgaacgacagatagcaaaaaggcgcctttagggcgcctttcaacactggtgggtcgtgcaggattcgaacctgcgaccaattgattaaaagtcaactgctctaccaactgagctaacgaccccttgcgggatgtacttcaaatctattcaggctggtgggtcgtgcaggattcgaacctgcgaccaattgattaaaagtcaactgctctaccaactgagctaacgacccattcgggtgttgcctgaattatcactcggaaccaataaaattggtgggtcgtgcaggattcgaacctgcgaccaattgattaaaagtcaactgctctaccaactgagctaacgacccgagtggtgggtgatgacgggctcgaaccgccgaccccctccgtgtaaaggagatgctctaccaactgagctaatcacccactctgtactgccagaactgctttaagtggtgggtcgtgcaggattcgaacctgcgaccaattgattaaaagtcaactgctctaccaactgagctaacgacccacttttgcgctgctttcacgttgtttgatatcccgtggcaacggcggcatatattactgatttaagaattctgcgcaacaaaaatttcgatgaagatcacttaactgcttaggaatcatgctgcacgaccagaaatgacgcgatttctggtcatgcgataatcaacccatcgaacttaaacgtttttgcgcttgtttggcgccgtctgtacccgggaatttcgcaaccacctgctgataaaccgctttggcttttgcagtgtcgcctttgtcctgcatgatcacgccgactttatacatcgcatcaggcgctttcggtgatttcgggtaatttttcaccacagaggcaaaataaaacgccgcatcatcctttttacccttgttgtaattcaactgacccagccagtagttcgcatttggctggtaagtggaatcagggtacttcttaacgaagttctgaaacgcaacgatagcatcgtcctggcgcgatttgtcctgcaccagggcaatggccgcgttgtagtccgtattcgcgtcaccgctctgtacaggcgcaccagacgacgcggaggcatctgccgcaggtgcaggcgttgccgcaccgctttgatcgcctgctgctggctgtgctgctgctccgccgctgttaaggctatccatctgcaacaaaatttgcttctggcgctccacaacctgattaagctgatactgactctcctggatctgaccacgaagggaatcaatatcattctggttatcggaaagctgctgctggagttgagttaaaagctggctgtgagcgttagaaatacgctcgagttgagtgacccggtcttctaccgagcctgagccgacactactgattggtgcctgagcaaaagcggcccagggggccgctattccaaccagtaacgacagactcatcagatgatgtctgaagttactgctcatgcaattctcttagtaaacgagtacggcacgacggtttttggagtaagccgcttcgtcgtgacccagtactgctggtttttctttaccgtaagaaacgatggagatctggtcagcagaaacgcctttaccctggaggtacattttaacagcgtttgcacgacgttcacccagggagatgttgtactccggagtaccacgttcgtccgcatgaccttctacggtgactttgtaagacgggttgctacgcaggaagtttgcgtgcgcatccagcattgcagcgaaatcagaacggatgtcgtatttatccagatcgaagtaaacgatgttgttctgctgtaactgctgcatctgaagacgcgcttgctcttcagaagacatattgccattgccgttagcgtccataccggtgccggcacccatcatgccttcgccgctctggtcattgcttgcattcttgttagaagaacacgctgcgattgccataacaggcagagcgatcatcagccccttcagcactttgttcagttgcatttctaagattcctttagtaatcaattaattattattacagatacggcgaccaggcaggtgattttacctgtccatcagttgccggaagacgcgctttgaaacgcccatctgtagaaaccagattcagcacggatcccatcccctgagaagagctgtagattaccatggtgccgttaggtgccagacttggcgtttcatccaggaacgttgacgacagtacttgtacgccccccgttaccagatcttgtttggcaatgtgctgctgaccacccgcagtactgaccattaccatcgttttaccatcggcactgacgtcagcatcctggttctgagaaccttcccaggtaatacgctgcgctgctccgccgttgatattcactttataaacttgtggacgacctgcctggtcagacgtaaaggccagattctggctgtccgggaaccaggttggctcagtgttgttgctacgaccatccgtgacctgacggatctgaccagaaccaatatccatcacgtacaggttcaggctaccggttttagacagggcaaacgccagtttggtaccgtccggagagaacgcaggcgcaccgttgtgacgcgggaatgacgcaacctgacgcacagcaccgttagagagcgtctggataaccagcgcggaacggccgctttcgaaggtcacgtacgccagcttagagccgtccggagaccatgccggagacatcagcggctgtggtgaacggtgtacggtgaactggttgtagccatcgtaatcagagacgcgcagctcataagggaactggccgccgttggtctgtactacgtacgcgatacgagtacggaacgcacctttaataccggtcagcttctcaaacacttcgtcactcgccgtatggcctgcgtaacgcagccactgcttgttcaccttatacgtgttttgagccagaacggtacccggcgcaccgccggtatccaccagctgataagcgacgttatagccgccgtctggcgcaggagtaacctgtccgacaaccacggcatcaatacccagtgcagaccatgcagcaggttgaacttcctgagcggtacccggctgctgcggcagacgagaacgatctaaggggttaaatttaccgctgttacgcaggtcagctgcaacaatgccgccaatatcttcaggcgcagcgcccgggcctgcccactggaacggaacgacaccgattggacgcgctgagtcgttccagtcggtaatgtcgatgcttactgtggcatgcactgctgacgtcaacagtactaaaaaaccaaaagctaatcgtaatgcctgcttcatcatatctcccttatccgaacaataagtcctggataatttagcagaaggttaacaaactcaaatacacaaaactatcagaacccgataaccgcagctctgcttacggcttaaagttcagcgaagcgtctttgaacacttcatagacagcctgtgacggaggttttggcagttttgcctgattcactgccacaagtgcagcctggcataacgcgtcatcgcctccttcagactcaacgctcagcacggtaccatcagtatgcagtttaatatgcagtctgcatgttttccctgtatacaatgatttatcgttaagcctgctggatatagccgcagcaatctggttcttgtagtcgttaatctcagcgccagaagcaccgttgttcttagtgttaccgcttcccgccggggctgcattactcccttttgccccaccgccagttttcggcgcattcttaccagaactcaggtcgccaatgatatcgtcagcggtggctgcttcagcggcagctttttcagcagcggccttcctggcagcggctttttcagcggcagctttcttgtcggctgcggctttttcggcagcagcttttttagctgcggcagctttatcggcagccgcttttttatcagccgcagctttttcagcggcagccgctttttcagccgcagccttctcggcagcagccgctttcttcgcagcatcggcagcagctttcttctctgcttcctgagcggctttcttcgcagcttctgcttccgctttcttctgggcatcagcagcggctttcttcgctgcttcggcttccgctttcttctgcgcatcagcagccgctttcttcgccgcgtctgcggctaacttagcctgagcatctgcctgcgccttcgcgtctgctgcggctttggctgccgcctcttccgcctgcttctgctgttcctgagctttcttcgctgcggcttcagcctgtttctgctgctccgcctgctctttagcggcttcctgcgcctgcaaacgctctttctcaagctgcttcagacgttcctgctcggcggcctgcttttcacgcagctcttccgcctgctgttgcgcctgtttttcacgctgttcttccgcgcgttttgcgctcgcctgctgctgttgctggcgattatagttctgcactaccgcaccgggatccaccatgacggcgtcgatggacgagcccccaccgccgcctgatgcatcaaggtgctcatcgaacgaactccagatcagcgctgcaaaaagaattacgtgcagcactgcggagacgattatcgctcgcttaagcttgtcgttctgttcggttgcctttgacactatcggttcccaaaaactacgcagatgatcaaataggctgagtcattaagccaactgacttaacgcccgcgctatgtagcaagttcagcgctttgataatttcatcatatggtacgtctttcgcaccaccgattaagaagaccgtcttcggatttgactccaggcgtcgttgcgcttcagcaataacctgctctggcggaagctgatccatacgatctttctctaccaccacgctgtactgccctacgccggaaacctcaatgatgaccggaggatcgtcattggtgcttaccgcctgtgattctgtcgcatccggcagatcaacttccacgctctgggtgatgatgggcgccgtcgccataaagatcagcagcagcaccagcagcacgtccagtaacggaacgatattgatttcggacttgagctcgcgacgacctcgtccacgcgatctggccatggtttaccccttgttgctctcggtgctggtaaacgcctgacgatgcagaatcgcggtgaactcttccataaagttgtcgtagttcagttccagtttgttcacgcgctggttcagacggttgtacgccattaccgccggaattgcggcgaacagaccgattgcggtcgcgatcagtgcttctgcgatacccggcgcaaccatctgcaacgttgcctgcttcaccgccccaagggcgataaaggcgtgcatgatcccccacaccgtaccaaacaggccgatatacgggctgatggagccaacggttccgaggaaaggaatatgcgtttcaagattttccagttcgcggttcatggagatgcgcatcgcacgcgacgccccttctaccacggcttccggcgcatggctgttagcgcgatgtaagcgagcgaactctttgaaaccgctgtagaaaatttgttcggagcctgaaaggttatcacggcgtccctggctttcctggtacagacgcgaaagctcaatacccgaccagaacttatcttcaaacgcttcggcttcgcggccagcggcattgaggatacgcgttctctggatgatgatggcccaggatgcgattgaaaaaccaatcaaaatcaacatgataagtttaaccagaaggcttgccttcaggaacaaatcaaggatattcatgtcagtcactgcttaaactccgcgacaatagacttaggaagcgcacgaggcttcattatggttggatcaacacagacaatcaggacttcagctgagttcagtaccgtgttctctgcattgactatccgctgcgtgaaaaccagtgaagttccgcgcattgatgtaatttctgtttggacttcgagcatatcgtcgagtctggcaggcgcaaaatactcaagcgtcatcttgcgtaccacgaaggcaactcgctcagccaacagcacctgttgactaaagtgatgatggcgcagcatctctgtgcgtgcccgttcataaaaagcaacgtagctggcgtggtagaccacaccaccggcatcggtatcttcgtaatagacacgtaccggccatcgaaacagcgttgtattcactttacatcccggtaatacaagaaaagttggagctttcaaacttcgctactatacgcgcgggaatgatggtttggaatgggagaaagtaaacggagagtaaatttttatgggccagggtaagcccataacgttaacggacatttcttattcagaagaagaagaaaatcaaaccggcgaggagaaccagatcggcaatcagtgggcagaagatgccctgccagtgtagcgctttcggacgaaagccgacaccgtgaatcacgcctgcgcacaccgcccacataatcaggaagccgtgccagatttcaagctcgctggttttcgccgcgaagcgcgacgggtcccagaagatacagcctgccagcagtaatgccataatgagggaaagcgcccttaaggggcgcttatccattaccgcatataacgttgcgataatattcattagtgcttttcttcacctgctttggtcgcttctacatgctcaagcgccagggcagtgatgacaccaaacgcacaggcaagaagcgtccctaaaatccatgcgaaataccacatattcagctccttacttagtacatagagtgggtgttgctttcgatatgttctttagtgatacgaccgaacattttccagtaacaccagatggtgtaagccagaacaatcggaacgaacacgcaagccacataggtcattaagttcagcgtcatatggctggacgttgcatcccacatggtcaggctggcattcatcatggtgctggatggcatcacgaacgggaacatcgcaataccggccgtcaggatgatgcacgccagcgtcagggaagaaaatacgaacgccagagcgcctttctccagacgagacgtcagcacggtcagcagtggcagcagcacacccagagccgggatagcccacagcacaggggtagtgttgaagttcaccagccatgcaccggcctgacgcgccacctctttggtcagcgggttagacggtgcagcgtggttgatcgcggaggtcaccacgtatccatcaataccatacaccacccacacgcctgccagcgcgaagcagaccagcgtcaccagcgccgccacctgagcggtagcgcgggaacgcaggtgcagttcacctacggtacgcatctggagataggttgcgccctgggtgatgatcatcgccacgctcaccacgcccgccagcagaccaaacggattcagcagctggaagaagttaccggtgtagaacagacgcatatattcgtcgacgtggaacggtacgccctgcaacaggttaccgaacgccacaccaatgaccagcggtggaacgaagctaccgatgaagatgccccagtcccacatgttacgccagcgggtgtcttcaatcttggaacggtagtcgaaacccaccggacggaagaataaagaagccagcaccagaatcatcgccacatagaagccggagaacgcagccgcgtagaccatcggccaggcagcgaacagcgcgccacctgcggtgatcagccacacctggttaccgtcccagtgcggggcgatggagttgatcatgattcgacgctcggtgtcattacgaccgaggaaacgggtgagcatgcccacgcccatgtcgaaaccatcggtgaccgcaaaaccaatcagcagaacaccgatcagcagccaccagataaaacgcaatacttcataatcgatcatttgatgactcctgtcttagcgtgccggctgagtagtcgcaacagactgctcgtagtggtagcgaccggttttcaggctgcttgggccaaggcgcgcgaacttgaacatcaggaacagttcagccaccaggaacagggtgtacagaccgcaaatgagcaacatggagaagatcaggtcgcctgcggtcagggaggagttcgctaccgctgttggcagcacctcaccgatcgcccacggctgacggccatattccgcaacaaaccagccggactcgatagcaatccatggcagtgggataccgtacagcgcggtgcgcagcagccattttttctcaccgatacggttacgaatgactgaccagaacgaggccgcgatgatcagcagcatgataatgccgcaacccaccatgatgcggaacgcgaagtacagcggcgcaacgcgtggaatagagtctttggttgccatctgaatctgcgcttccgtcgcgtcggagacgttcggggtatagcgtttcagcagcagaccgtaaccgaggtctttcttcacgtcgttaaattgatcgcgaacggcctggtcggtagagccggcgcgcagctgttccagcagcgagtaggctttcatcccgttacggatacgctcttcatgctgcaccatcagatctttcaggccagtcacctgtttgtcgacggagcgcgtggcgataatacccagagcgtaaggaatttgaatggcgaagcggttttcctgcgcttcctggtcaggcacaccgaacagggtaaacgctgccggtgccggctgggtttcccattcagcttcaattgcggcgagtttggttttctgcacgtcgcccatttcgtaaccggattcatcacccagaacaatcacggacagaatcgcggccataccgaagcttgctgcgatagcaaaagaacgcttggcgaacgcgaagtcacggccgcgcagcatatagtaggagctgatgcccagcacgaacatcgcgccgcacacatacccagacgccacggtgtgaacgaatttaacctgagcaaccgggttcaggaccagctcagcgaagctgaccatctccatacgcatggtttcgaagttgaaatcagatgcgattgggttttgcatccagccgttcgccaccaggatccacagtgcggacaagttggagcctaatgccaccagccaggttaccgccatatgctggactttacccagacggtcccaaccgaagaagaacagacctacaaaggtggattcgaggaagaaggccatcagaccttcaatggccagcggcgcaccgaaaatatcccccacatagtgggaatagtaagaccagtttgtcccgaactggaactccatggtcagaccggttgccacgcccagcgcaaagttgataccaaacaacttgccccagaacttggtcatatctttataaatctgtttgccggagaggacgtaaaccgtttccatgatggccagcaggaacgccataccgagcgtcagcggcacaaacaggaagtggtacatcgcggtcaaggcaaactgtaagcgcgacagttcgactacgtctaacattatgactccttgctcatcgcatgaagactccgagagtgaaccccgttagataaggatccacacgcatgccccaatacaaagttatctgcttcccttcttcgttgcttattctcttcaggaggaaaaagcaatgatgaaaggttacaaatacgttaagaaaaaaccaaattgatcccgtaaatataatacgctgcaaaacccttacaataaacaggtttttattcgaacagatttacgtttttcgacggcgatcaatttatagcaaaattaccacttttcggccattttgatcggggacaatttaacgcctttcggagcctttttccaaggattaaacattgatttaaatcaaaaacagtcagagctgttaatgatgtttctttgtggtgcggatagtaaaaaccttgttaacaatatgtatatttaaaggcgttattggttataaaagccagaagataatataaacagttgtgatttttattaacgcgcgagaaaaaacgcattttgccgaaagataaccatataatgttatctgcttcacagtatttttctttcactttgctacccgccgaaacgattacatttcattcacctttaataatcttaaaattaacaccctttcgtgactatttgatgaaataaaggccgcaggaatgcggcctttattttgttcggaggattacctttcaatttttatgctaaaggtgcgtgactggcctggccggaaaggtcccgtaatggctgagccctcctccccttgcgccttgcggacctcattcatgtccgtttcgcaacaggcctggacctcacggttcacagacaaagtcacatcaccggagcgggtctccgaagggttgtacagacgaagaatcatctcgtcacgatcctccgcttttttcagcgcactgagtacgcatccgttaggcgccagcgttaacaggctatagctacagggtgtggtgaaagaggcgcggttaagcttcatcgcatcccacgggattttgttataacagtgcactggcgttaaccacgacttcgcctgctgcgcaacgccagcactgacgggcgtaccattaaaactgaacaggctaaagcgacaggttaactggccccgcatctgcgaatcaggcaccggcattttgatcccggacggtctgccggggcgcagcagtaaatcttccttcccaagcacccccacgccgcgaagcaacgtcagggcaaacgttttttgacgctcgccagtcacttcaaattcgcgcaacccttcggtaaacagggccattccgttacgccgttcctggagcaccgcgtagttgagcagattccacaccggcagcggcgcttccttccagccctcctcctgccagttcgccatcgcttcatcctgtacaggtcgcgtcagcgaaccgaactgggtatcggctaacaccgtgtctgcggtaaatggcgtcgggatcagcacccgcacacggtggtcatccgcgtgatttccgagacgcgcctcaacgtcgatacgtcggctgttatggctgagcgtgaccgtgagttctgcctcaagcgttcccgtctgctgacgcgcagaacgttcggtgagatccgccggcaccgccatgcgatggcggatcaccgccctgctctgccaggcctcgtggatcacctcaacctcatgctcgccctgagcggaagtgagtctccactcttcccgtgaaggcgagtagtcgtactcatcgccatcatccgagctctcttctatttccagcgcgcggtcatagataagcccggacgctttatcgagcagacgcagggtgccgtcgtcgtttaacgttatttcccagaaagcattttccagcaacgcctccgacgatttttctgccgccagcagcttgccggccacgtgcggctcgatatagagcgtgcggtaacccattgatggcaggatctgattgagctggatatcaaactccataaagggatcgtagttgccgtaatgcacaatttgccggtcaatcaagccggggtcgatttcacgcgcgctgcgcaggcagtaagggatttcattccccctatcgtccagcaggcggaactggctggcgcgcagacgtatcgtggtgttaatcacttcctcacgcggccagggcgtgaggttaaacatcaccagtttgtcttcctcgctctgcggcatgttgtcgacaatcttgcgcatatagaagcacgtcaggttatcggccatgtcttccgccagctcgaagcgtgacatcacctcacgatgcactttgtcactacagcagcagccgatactgtcgtgggcgtgattcttgaggatctctttccacattttttccagcaagccgtggtgatactcaaagcccagcgtccaggcaagcgtggccagcggctcaaggacgttgacgattttattctctatccgggcgtgggcgattttgatatccatccgcgtggagcctatcgtccggtgcactcgcatatatttaccgtcaataaactcccctttcagcgtcgccagttcatcgcggtgcgcgtcaatgtggtcaaacacctcctcgaagcggctcatcacaaactgacgctgcggatagatttcgcgcagcttatccatcaccgcaaagatgttctgctggagcggcatctgatcatggccgttaggcagtaaaatttctttcgtcacggaggctttttccagcacctcgaagtacgtgtcgagccgtttgcgcagcccggcctcatcctccggtaagtacttaccaatcgcgtagcccagcggcagcacctgtgccgtcacttcgctgccgtcctggctttgccagagaaattcggttttatcggtaccgtgccgctcggaacacccgcgccagaacatggtgcgcgtgatgccaaaaccgttgtaaatgtgcggcagctgggaagacatgccgaaggagtccggcagatagccaattttcatcggctcgccaaaggccagacagtcgcgaataccgtacatcagatttcggacaatcgactcgccggagacaagggtggtgtccgtctgggtataccacggcccgataatcagcttcccggccgccaccagcgccttcacgcgtggcctgttttccggtttcacggcaaaataatcttccagcaccgccgtctggccgtcgagaacgtagtatttatactctgcgtcctgctcaagacgggtgaggatctcttccatattattgaccagaagaatacgtgacgcttcggtggtgaagtaccactcccggtcccagtgcatatgtggcgtgatatgaacgcgagatacagctttcatcttcgtttcctgtcagtgcgtgtttacgatggtatgtcttcagtcacgtaggtgccgctcttcacggcctggcgtcgccagagcagtaaaatgagcgtagagattgcggcgccagccagcgcggcgccaaaccagccgacagcggccatcacgccgcccagcccggcatcatgcagtaagaagagcgagaaaatgcccgcgccgggggtggatagcccaatccccatcgccccgacaatcgctccggtcaccattgaccccagaacaaatgagccaatgacccgcaacggatcctcgatagccatcggaattgccccttcggtgatgcccgccagccccagcagccaggtggacttgccggtttcaatttcgaactgtttgaacaggttcggagccagcatcgttgatgccgtcacggtaaaggccgataccattttgacggaggcaaaaatcgcataaggcccgtatacgccattggccatcgctcccagacagaacgcgtaagaggctttgttgaccggaccgcccagatcgaacgagcacataaagcccaggatcgcccccagcagcagcgcattcgcgccggacagaccgttaagccaggcggtcagggcgttattgatccaggccaccggttcgccgatcaaaaacagcatcaggctgcctgcgcccagcacgccaatcaccggatagagataaaaggtcagaaagccgttgtagcggctactcagccggatgtggtttttcacccagcgcatcaggtagcccgcaatcagcccgccgacgatggccccgagaaaaccagagccgatcatattggcggcaagacccgccgcaaagcccggcgttagcgcaggtttatccgccagcgagtaagcggtataggccgccagaacaggcaccatcagaataccgagcatcccgccgcccagtttgcggtacatccacagccacgagttttcctgatcgaacagatgctgcaagcccaggatttgcgcaagcagtaccgacaccgccagcaccgtaccgccggcgacaatcagcggtaccgcaaaggagataccgctgagcagcgcctgcttgagttcggttttaacgcactttttcgcgtccgtgtcgacgtgcgcaggacgcgcatcggatacaggctgtagcgccagcgcacgctcaatgagcgcttccgcatggcgtaagggttccgcgacgggcacggaaatggcgggcatcccctgaaaacgctcacgctctttgatcgccacttccgccgcgaagatacacgcttttgcctcctgcaactgctgcgcggtgatgcgcccctcaataccatttgccccctgcttttcgaccaccacattgacgccgagcttacgtcccgctttttcgagatactccgctgccatgtaggtatgggcgatcccggccggacaggcggtaacgcagacgatcgtcggggcattctccgcaacggcggtttcttgtgcgtcaggcgctgtttccagcgccgcaagcaccgcttccgcgctggtcgccgtcatcacgcgcgccctgagctcgtcatccgccaggcgagacgtcagttccgtcaggacctgaatatgcgttgatcccgcttgtgcgggaggaatggcgagcagaaaaatcagctcgacctcctccggtccgtccacaccttcccaggccagcggctcacgcagtgtggccacggcaaaagccgcttcgtttaccgccactgatttaccatgaggtacggccagcccctcgcccagcgccgtcgggccaagcgattcccgatggaaaacgtctgccagaaacgtatcggcgttggctattttgcccaacgccaccagccgcgtcgcaagctgacggattgcctcatcacggctggtaaactgcgcctgcacgcagacagcacgggggtcggtcagagtcgtcaggttcataagatcctcacctatccaaagttattgtctgggcaggattgtggcagaccggataatacatttatgtgatcattttcactaacaccgatatttgtatcttatttgtattatttacaaatttaccactgaaggcataattccctgaaaacgtattaaaaaggcgcgacacaatgggcaataaaccgatgtaccggcagatcgccgatgcgttccgcgagaaaattaatgccggtgagttaaaacctggcgacgcgctgccgacggaatccagccttcagcaggcgtttagcgtcagccgggtcaccgtgcggcaggctttgaagctgctcgccgacgagcagatcatcgaaagtattcagggcagcggctcgtatgtaaaagaggagcgggtgaattacgatatttatcagctcaccggtttttacgaaaagttagcggatcgcaacgtcgatacgcacagcgacgtcagcgtcttcgaagtggtgaaagccgatgagcggctcgcggcaaaacttgcgctcaatccggatgataaggtctggcacgtcaagcgcgtacgcttcatcagggaaaagccggtgaatctggaagagacatggatgccgctggcgatgttccccgacctcacctgggaagtgatggaacagtcgaaataccattacattgagcagatcaaaaagatggtgatcgatcgcagcgagcaggagctggtgccagtcatgccatcggatgaggcgattgccgccctggcgctcgatccggcaaaaccgattctggaaaaagtctctcgtggctttctgaaagacggccgggtatttgaatacagtcgcaacgtgtttaacaccgacgactataaattcactctggtggctaaacgcaggcaataaaaaaaggccgctttacagcggccaaccatgtcgaaacggacatttttttatacttcaacgcgccccattcggggagcagagaggacttacttaatgatggatttcagtgcttcaccgatatccgccaggctgcgaacggttttcacgcctgcggcttccagtgctgcgaatttctcatcagccgtacctttaccgcctgcgataatcgcgcccgcgtgacccatacgtttgcctttcggcgcggtcacacccgcgatgtaacccaccaccggcttggtcacatgatctttgatgtaagcagccgcttcttcttccgcgctaccaccgatctcaccgatcatcacgatcgcttcggtctgtggatcttcctggaacagcttcaggatgtcgatgaagttagagcccgggatcgggtcaccgccgatgcccacgcaggtggactggccgaaaccgtagtcggtggtctgcttaaccgcttcataggtcagggtaccggaacgggacacgatacccactttgcctgggcgatgaatgtggcccggcatgataccgattttgcattcgcctggagtgataacgcctgggcagttcgggccgatcatgcgcacgcctgcttcgtccagcttcaccttcacggtcagcatatccagcgtcgggatgccttcggtgatggtgatgatcagcttaatgcctgcgtcgatcgcttccagaatagagtctttgcagaacggcgccggtacgtagatcacggtcgcggttgcgcccgtcgcttctaccgcttcacgcacggtgttgaacaccggcaggcccaggtgcgtggtgccgcctttacctggcgttacgccgccaaccatctgcgtaccgtaggcaatcgcctgttcggagtggaaagtcccctggctaccggtgaagccctggcagataaccttggtatctttattaattaaaacggacattatttcccctccactgcggcaacaacctgctgagctgcatccgtcagacttttcgctgcaataatattcaggccgctgtcagccagttttttcgcgccgagttcagcgttgttcccttccagacgtacaacaaccggaacgctaacgcccacttcttctaccgcgccgatgataccgnnnnnnnnnnnnnnnnnnnnnnnnnnnnnnnnnnnnnnnnnnnnnnnnnnnnnnnnnnnnnnnnnnnnnnnnnnnnnnnnnnnnnnnnnnnnnnnnnnnnnnnnnnnnnnnnnnnnnnnnnnnnnnnnnnnnnnnnnnnnnnnnnnnnnnnnnnnnnnnnnnnnnnnnnnnnnnnnnnnnnnnnnnnnnnnnnnnnnnnnnnnnnnnnnnnnnnnnnnnnnnnnnnncgcttcggttacgcgctctttggttgcgccaccgcccacgtcgaggaagttcgctggctcaccgccgtgcagcttaacgatgtccatggtgcccattgccaggcccgcaccgttaaccatgcagccgatgttgccatccagcgccacgtagttcagttcccactgtgcagcctgcgcttcacgcggatcttcctgagactggtcgcgcatttcgcgcagatcggactggcggaacagcgcgttgccgtcagcgcccagcttgccgtcgaggcagatcaggtcgccctgggtggtgatcaccagcgggttgatctcgatcagcgccaaatcgcgctccaggaaaatggtcgccagacccatgaagatcttggtgaactgctgaaccagcttgccttccagacccagtttgaatgccagctcacgaccctggtaaggcattgggcccgccagcggatcgatagccactttgtggatcaggtgcggggtttcttccgccactttttcgatttccacgccgccttcggtagacgccatgaacaccacgcgacgggagctacggtctacgactgcgccgaggtacagttctttcgcgatgtcggttgccgcttcaaccaggatctggttaaccggctggccgttcgcatctgtctggtaggttaccagacgcttgccgagccaatgttcagcaaacgcacggatctcttctttgctcttaacaaccttcacaccgcccgctttaccacggccaccagcgtgaacctgacatttaactacccacgggccggaaccgattttagacgcggcttcttctgcttcacgcggggtagtacaggcataacccaccggagccggtaagccataccgggcaaacagctgtttggcctgatattcatgtaagttcatgtgttctatccatccttcaggtaatcgttaggtagtgcttttgtaggcccggcaagcaacgcgccgccgggcaagactgcaaaaactagacgtccagcagcagacgcgttggatcttccagcagctctttaatggcaaccaggaagcctacggactcgcggccgtcgatcaggcggtgatcgtaagagagcgccaggtacatcatcggcaggatctcaactttaccgtctaccgccattggacgatctttaatggcgtgcatacccaggatcgcgctctgcggcgggttgatgatcggggtagacatcagcgagccgaacacaccaccgttggtaatggtgaagttaccgccagtcaggtcctcaacggtcagcttgccgtcgcggcctttcacggccagctctttgattttcttctcgatgtcagccatacccagggtatccacgtcacgcagaaccggggtaaccaggccgcgtggggtagaaaccgccatgctgacgtcgaagtagttgtggtaaaccacgtcatcgccatcgatagacgcgttcacttccgggtagcgtttcagcgcttcaactaccgctttcacgtagaaggacatgaagcccagacggataccgtgacgtttttcaaacgcgtcaccgtactgcttgcgcaggtccatgattggcttcatgttgacttcgttaaaggtggtcagcatcgcggtggagtttttcgcttccagcagacgctcggccacgcgcttacgcaggcgggtcatcggcacgcgtttttcgctacgtgcgcccagagctggctgtgccgctggtgctgccgcaggggctttcgcttccgctttcgcctcagaaggcgcttttgccagatgcttgtcgatgtcttcgcgcgtcagacggccacccacgccggtgcctttgatggctgccggatcgaggctgtgctcagccagcaggcgacggatcgccgggctgagcgcgtcattggtctgatcggacagagacgcctgctggcgctgggccggagtagacgctttctcttcagatttggcgctggactctttgcccgcgctattgccttcacgcaggcgacccaggatctggcgagaagtgacggtcgtaccttcatcttccaggactgcatccagaatgccatccgctgaagccggtacttccagtaccactttgtcagtttcgatttctaccagcacttcgtcacgggttaccgcgtcgcctggttttttgtgccaggtggcgacggttgcatctgctacggactcaggcaggtcgggaacaagaatatctacgctactcattatgtatcctttaattaatcgacgttcagcgcgtcattgaccagatcttgttgctgcttctggtgaacggacatataccctaccgccggagaggcggaggccgggcgacctgcataacgcagagcagacccaaatggaatcacttcacggaaatgatgctggctgcaataccatgcgccctggttgagcggctcttcctggcaccagacaaaatcatgaacgtgagcgtactgtttcagcacttcctgcatcgcctgatgcgggaacggataaagctgttcgatacgcacgatggcgacatctttctgatcgttcttacggcgctgttccagcaggtcgtaataaaccttaccagaacacattacgacacgcttaacggcctgcggatccagctcgtcaatttcaccgatggccggcaggaaggtgccgtttgccagctcttccaggctggagaccgccagtggatggcgcagcagggattttggcgacatgaccaccagcggacggcgcataccgcgcagcgcctgacgacgcagcatgtggtaaacctgagccggagtggacggcacacaaacctgcatattctgctcggcgcagagttgcagataacgctccagacgcgcggaggagtgctccggcccctgtccttcgtagccgtgcggcagcagcatcaccagaccacacatacggccccacttctgctcaccggaggagatgaactggtcgatgacgacctgcgcaccgttggcgaagtcaccgaactgcgcttcccagatggtcagagtgcggggttctgcggtggcgtagccgtattcgaaggccagaaccgcttcttctgacagcacggagtcccagaccttgaactggccctgaccgttatgcacgtgctgaagcggagtgtacgttgaaccgttagactggttgtgcacaaccgcatgacggtggaagaaggtgccacgacccgcatcttcaccggacagacgaaccggaataccttcgtcaaccagcgtcgcataggccagcgtttccgcgccgccccagtcgaacagcttctcacccgccgccattgcctggcgatcgccatagatcttggccacgcgggactgcatctcgatcgcttccggcacggtgctgatgcgtttagccagttcctgcaaacgcttcatctcaaccttgttcgggtagctctcgtcccactcgtggttgaggtacggcgaccaggtgaaggagtgcatgttcattggacgcagctctttcactacgcattcacccgcatccagcgcgtcgcggtagaggttgaccatctcggtcgcatcttccagcgtcgccactttttcgctttccagcttgtcagcatagattttacgcggcgtcgggtgttttttgattttctggtacatcagcggctgggttgcacttggctcatccgcttcgttgtggccgtgacggcggtagcagaagaggtcaatgaacacgtcgcgcttgaaggtgttacggaagtccagcgccagacgggtaacgaaagcaacggcttcagggtcatccgcgttaacgtggaaaattggcgcctgaaccattttaccgatgtcggtgcagtacggggtggaacgcgcatccagcgggttagaggtggtgaagcccacctggttgttgattacgatgcgaacggtaccgcccacttcataaccacgcgctttcgacatgttcagggtttcctgaaccacgccctgccctgtgaccgccgcgtcaccgtgaatagtgattggcagtactttattgctgctcggctcgtccagacgatccagacgcgcacgcacggaaccgataaccacagggctgacgatttccaggtgcgacgggttaaacgccagcgccaggtgaacctgaccgccctcggtttcgatatccgacgagaagcccatgtggtacttcacgtcaccggtgccgaggtgctctttatgtttacccgcaaattcgtcgaacagatcctgcggctttttacccagcacgttaaccagcacgttcaggcgaccacggtgcgccatgcccagcaccacttcgcgcgtgccgctcttaccggcatgacgaatcagctctttcagcatcgggactaacgcatcgccgccctccagtgagaagcgttttgcgccagggaatttcgcgcccagatagcgctcaaggccttccgctgcggtcagttcgctgagaaaacgttttttctcatctgctgagaaattcgcgtggcctgccacggattcgatacgctgctggatccagcgtttctcttcggtggaggtaatgtgcatatattccgcgccgatggagccgcagtaggtttgcttgagcgcgtcaatcagatcgcccagcttcatcgtgtctttgccgatggcaaaggaacctacgttaaagctttcctggaaatcggcctcggtcagatcgtgataagccggatcgagatccgctacacgttcctgctgccacagtcccagcggatcgagattcgcatgctggtgaccacggaagcgataagcgttgataagttgcaggactttaacctgcttcgcattggtgtcagggtcggaaatcgcagaagagtaacgtgaggcatccttcgccagacgacggaaataatcacgtgtttttgaatggaattgatccggtttgacccctgtaccaggcaactgctggaacatggaacgccagtttgcgtccactgagtcaggatcggttaagaagtcttcatagagctgttctatccagctctggtttgaaccagagaggtaagaagagtccagccaggctttcattgcgccgttctgcatcgtgatcccttaagcatttttatgcttactttcgccgtagaaactaccacgcacaccacgtgtacgtgccggggttcacctgcgagctcttttcatttggcccgcgaaggaacctttagaaactgtctaaacttcagggcagtttttaaaggtttctgcaatttgcccggtgacgctacgcttaccgggcctactgttacgtaggccggataagcgcagcgccatccggcgttgttacttacgcactgcgctgcaacaacatcgacttaatatggccgatggcgcgcgtcgggttcagccccttaggacacacactgacgcagttcatgatgctatggcagcggaatacgctgaaagcgtcacttagcccttccagacgattctcggtttcggtatcgcggctgtcgatcaggaagcgataggcagccagcagacccgcagggccgataaatttatccgggttccaccagaatgacgggcatgacgttgaacagcatgcacagagaatacactcgtacaacccatcgagtttttcacgctgctcaggagactgtaagtgctcgcgagcgggtggattttgcccattattcaataagtaaggcttaatcttctcatattgtgcatagaattgccccatgtccaccaccaaatcacgcacgaccggcaggccaggcagaggacggatcacaattttctggccaggacgctgtagcactgaaattggcgtgatacaggccagaccgtttttgccgttcatgtttacaccgtcagagccacacaccccttcacggcaggagcggcggaacgacagcgtaggatctttctctttcagctggattaaggcatccagcagcatcatgtcacgaccttcttccgcttcgagggtgtaatcctgcatacgcggagcatcgtctacatccgggttataacgataaactgagaattcgagtttcattatcctgtctccgcattagtaagtacgaatcttcggcgggaacgccggacgcagtttcggttccatgttaacgctacgacgcgtcatggtttccgactctggcagatacagggaatggcacagccagttttcgtcatcacgatccgggaagtcgaagcggctatgggcgccacggctttcggtacggaagtttgccgacatcgcagtggcgaacgcggtttccatcaggttatccagctccaggcactccacgcgctgggtgttgaactcgcttgaggtatcgtccagacgggcattcttcagacgctcacggatcgctttcagctgctcaagccctttggccatcgcgtcaccttcacggaataccgagaagttgtgctgcatacactcctgcaacgccttacggatctccaccggatcttcgccgttacgattaccgttccagcgattgaggcgctcaagagaggcatctatttcgtcgtcggtcgcatcacgcagcgcgccctgctcggcaatagactcctggagatgcagacccaccgcacgaccaaataccaccaggtccagcagggagttgccgcccagacggtttgcgccgtgcacggatacgcaggcaatttcgcctaccgcgaacaggccagggatgaccacgtcttcgccctgctcgttcacggtcagcgcctgaccggtcactttggtcggaataccgcccatcatgtagtgacaggttgggataaccggaattggctctttcacagggtcgacgtgcgcgaaggtgcgggacagctccagaatgcccggcagacgggattccagtacttctttacccagatggtcgagtttcagcttcgcgtgtggaccccaagggccgtcacagccgcggccttcacggatttcgatcatgatggaacgcgccaccacgtcacggcccgcaaggtcttttgcgtttggcgcataacgctccatgaagcgctcgccatgtttgttcagcaggtaaccaccttcaccacggcagccttctgtcaccagtacgcccgcaccggcgataccggttgggtggaactgccacatctccatgtcctgcaccggcacgccagcgcggatcgccatcccaacgccgtcaccggtgttgatatgggcgttggtagtggactgatagatacggcctgcgccgccggtcgccagaacggttgcgcgggctttgaagtagaccacctcaccggtttcgatgcacagggcggtacaacccaccacggcgccatcggcgtttttcaccagatccagcgcataccactcggagaaaattgtggtgtggtttttcaggttctgctgatacagcgtgtgcagcagcgcgtggccggtacggtcagccgccgctgcggttcgtgccgcctgctcgccgccgaagtttttcgactggccgccaaacggacgctgatagatggtgccattttccagacgagagaacggcagacccatgtggtccagctccagaatcgcttccgggccggttttacacatatattcgatggcatcctggtcaccgatgtaatcggaaccttttaccgtatcgtacatatgccattcccagttatcttcatgggaattacccagcgcaacggtgataccgccctgcgcagacacagtgtgagaacgggtcgggaatactttagagagcagcgcacaggtctggccgctctgggaaatttgtagtgcggcgcgcatacctgcgccacccgcaccaatcacaacagcatcaaattctctgactggcagtttcattacacaccccacaccacaacaaatccataaatgacgtaaaccagcagagcaacaacaataatcagttgcagcggaaggcgaatcgccagcggtttaacgtaatcggtcaacacctgccacatgccaatccaggcatgaataaggatggagaacagggccagcagggtgaacactttggtgaaggccgatccgaagaaaccactccagatttcccacgtcagcgtgccgctggtcgcgaagaaaccgatcatatagatgatgtaaagggtgagaacgatggcggtagcacggaccaggatgaagtcatgtacgccgttgcgtcctaatgcggaggcgttgcttaccatacgagaactcctgcgagaagtgaaagcacgacagtgatcacaaatgaaatgttagcggtacgtttaccggcctcgaacgtctcttccaggtagccaaagtccatcagcatatggcgaacgccgccaaccacgtgataggccagcgcggtcagaatgccccacatgataaatttcacgaagaagctgttcataatggctgaggcctggaggaatccttcaggggatgagaggctggttcccagtaaccacagcaagataccgaccgccacaaacgtaatcacaccagaaacacggtgcagaatggacgctattgctgttacagggaatcggatcgttttcagatccagattgacaggtctttgttttttcacatttcttatcatgaataacgcccacatgctgttcttattgtttccttcctccggactgcgatgcgggtcagacagcgttccttttctataactgcgcgtcatgcaaaacattgcttccaaatgctaaaacgacacgttacaacgctgggtggctcgggattgcagggtgttccggagacctggcggcagtataggccgttcacaaaatcattacaattaacctacatacagtttgttgggttttctctggaacagtgatcggggtcacgataacaacatctttttaatttttaatcatctgatttgacaaatgttaaacaatattgttacaaacgtcatcagaaaaggcatataatgcgcaaaagttatgaggtctctctttcacctgacaaatagttatgtaacagtgtgatggtattgaccgaagttatcaggacagttattagtgatatacaggtttgaataattcggactgcaaaaacgctgatttgctgttgtttcactgatatttcattcgtttacctgcaaggcgccatagctctgtaccctggtttctcctcgtgagctgagcggtaagccaaataacaatctggtaacgatgattaacagctgaaagcaaatccggtaaagcgcagtcttaagcataaggcgctaaggagaccgtaaatggctgatacaaaggcaaaactcaccctaaatggtgatgatgctattgaactggatgtgctaaaaggcacgctcggtcaggatgttattgatatccgtacgctgggttccaaaggggtattcacctttgaccctggattcacctccaccgcatcttgcgaatccaaaatcacctacattgacggtgacgaaggtatcctgctccatcgcggcttccccatcgatcagttagccaccgaatccaactatctggaagtgtgctacatcctgctgaacggcgaaaaaccgacgcaggcgcagtacgatgaatttaaaaccaccgtgacccgtcacaccatgatccatgagcagattacccgtctgttccatgcgttccgtcgtgactctcacccgatggcggtcatgtgcggtattaccggtgcgctggcggcgttctaccacgattctctggacgtgaataacccacgtcaccgtgatatcgcggcgttccgtctgctgtctaaaatgcctaccatggcggcgatgtgttacaaatactctatcggtcagccgtttgtgtacccacgcaacgacctctcctacgcgggtaacttcctgcgtatgatgttctccacgccgtgcgaagagtacgaagtgaacccggtgctggaacgcgcgatggaccgtattctgatcctgcacgctgaccacgaacaaaacgcctcgacctctaccgtccgtaccgcgggctcttccggcgcgaacccgttcgcttgtatcgctgcgggcatcgcctccctgtggggaccggcgcacggcggcgcgaacgaagcggcactgaagatgctggaagagatcagctccgttgagcacattcctgagttcgtgcgccgcgcgaaagacaagaatgactccttccgtctgatgggcttcggtcaccgtgtttacaaaaactacgacccgcgcgcgaccgtcatgcgtgagacctgccacgaagtgctgaaagagctgggcaccaaagatgatctgctggaagtggcgatggagctggaacacatcgcgctgaacgacccgtacttcatcgagaagaaactctacccgaacgtcgatttctactctggcattattctgaaagcgatgggcattccgtcttccatgttcaccgtaatcttcgccatggcccgtaccgtgggctggattgcgcactggaacgaaatgcacagcgaaggcatgaagatcgctcgtcctcgtcagctgtataccggctacgagcagcgtgattttaagtctgacattaagcgctaaaaaacacgcccggcggcgcttcgcttgccgggcctacaagtgcgagatgtaggccgggtaaggcgtagccaccacccggcttttttacatctggcacccaggacaccagtaaaacggcctggaagagatcgtcgccttctcaatcaccccgccgcaccgctcacactttttacccgcccgatgaaacaccttgaagcggaacagcgccccgtgatgcttgttctcatccaccacgccgcgcgtgttgtacgacagccgtggaatatccagtaacgcgtgcgacagcgcctccagctgttcatcgctcagctgcgacgctttgtgctgcggcgccagccccacttcccagaggatctccacccgcaggtagtttcccagccccgccagaaatgcctgatcgagcaacagcccggaaaactgccggttgcggaatgtgggggataacaaccgggctttcacatcgcttgccgtcagacgcatgtcgagcacgtccggcccgacccgctgtaagaacggatgcgtcagcagctgctccggcgttaacatttcgatatcagaggcgctgtagagcaggatcgccttatccgccgtttgtagccgcacgcgcagcacgcgggtcgtttgcggctgctcgtccgcctccaccacccgccagacaccgtaaagctgattatggctgtataacgtcaggttatgggaaaagtgggtgagtaacgccttgccgcgcgtttcaatgtgggtcaccgtctgccccaccagctgcgattcaaacggcttgagttgaggaaaggcaaaccagacgtgtgtcaaaggtttgccctttatcgccgcctccaggctatccgccgcgcggcggatctccggaccttctggcatgttattgtcctttcatgattattctgcgctgacaacaatgccctcttccgagaacgccatccgcaggcgtcgcgcaaactggagcgcatgctcgccgtcaccgtgtaagcacaccgtatcagcctgaacgtttgccgttgtcccctccgttgaggttactcgcccgaagcgcaccatctccagcgtctgcgccagtgctttaccttcgtcggtgatcagcgcaccggcctgcgtacgcggaacaaggctaccgtccggcaggtatccccgatcggcaaacacttcctgccgcgtagtcagccccagccgttctccggcacgaataagctcgctgcccgccaggcctaccagaatcagttgcggattacagtcccgcaccgcacgggcaatggcatccgccagcgccggatctttcgccgcctggttatagagcatgccgtgcggcttgacgtggcgcaacacgccattctcagcgcgcactatcgcctccagcgcgccgatctggtagagcatttgcgcgtaaaccgtctcaggcggcagatccatcgctgtgcgaccaaagttttcccggtcgggaaagctggggtgagcgccaatcgccacgccgtttttcatggcattgcgcacgctcgccagcatggtctgcgcatcgccggcatgaaacccgcaggcgatattcaccgaggagaccagcgtcatcagcgccgcatcggcgttgcggccctcccccagatcggcgtttaaatcaatctttaccatcgagcctccacgccagctgttcgagataacgctgctgatcctgccgggctttcagcgcctcctccaacgaacactgcacaaaatgaatgggctgacctagaggaatttgcgccagatggtagcgatccgcttcgataatgcaggcaatacgcggatatccccccgtggtttgcgcatcgttcatcagtacgatgggctgcccgttgcccggcacctgaatcaccccgggcaacagaccatgggaaagcagctcccggtcagtcgtgcgggtcagcggctggccctgaagccggtaacccatgcggttactctgcgggctgatcttccacggcgagcgccagaaagactctttcgcggcttcatcaaactcatggtattccggtcctggtaaggcgcggatcacgttcccccacagcagctgtttcacgccctgcgtggtggtgaaatggcgcgttgaggtctttattcgcagacgatcgccgtcacgcagcagccgtccttcatggccgcccattcccgctttctggtcggtgctggatgagcccaacacctccggcacgtcgatcccccccgccaccgcaagatagctgcgcacgccgtgcagaggacgcttgagcgtcagacgctgcccggccttcgcccgcaggcgccagccggtccacaccgctttgccgtccagcgtcgcgtcacagcccgcgccggttaaggcaaaccaggtttcctgaccaaactcaatcacgcactgacccagcgtaatttctaacgccgccgtgctgcctgcgttacctaccagcaggttggcaatctccagcgaagggcgatcgagcgcaccgcagtagctcacgcccgactgacgcagcccaaaacgcccggcatcctgtaccgaggtgtaaagccctgcgcgaataagcgttaacataccccctccttctgcgggataaagcgcagggtatcccccggacgcaggagtatgggcgcgtcctggcctggttcaaataacggcgtggacgtgtgcccaatcagctgccagcctcccggtgaggcgagcggataaattcccgtttgctcgccaccaatcgccacgctgcccgccggtacgctcaggcgcggctcagcccggcgcggcgtatgcagctggggcgataacccgcccagataggggaaacccggctgaaaccccaaaaaccagacaacatagtcgactgagctatgcagctccacaacctgcttctccgttaatccacagtgttcggccaccacgccaaggtcgggacctcccttgccgccatagacaaccgggatctcaatcgtccgcgattccggctccagcgcctcgctctcctcccaccagcgttgcagacgctcaatggcatccagcgcccccgtgtgcggatcacgcagcaccacggtgatattattcatacccggaatagcttcaaccacgccgggtagctcgggcagtcgctgagccagacgccagatacgcttttgcgtggcaagcgtcaccggaggctcaagctccagaactaccgcggtttcacccagaagataacaacgcgctcgctgcacttaactacctctcatcaggccggattagggatatcaataaacgtcacatccagatcggtattttccgtcagccactcgctgagggcgcggatgccgccacgctcggtggcgtgatggcccgccgcgtaaaaatgcaggccttgttcacgggctgagtgaatggtctgctcggagacttcgccggtaatgaaggcgtcgacaccaaaacgcgccgcgctgtcaataaagccctgaccgccgccggtgcaccatgccacgcgcttcacggtatccggcccggtgtcgccgcaccacagcggacgacgccccaggcgcgcttcgatccacgaagccagctccagacccggaaccgnnnnnnnnnnnnnnnnnnnnnnnnnnnnnnnnnnnnnnnnnnnnnnnnnnnnnnnnnnnnnnnnnnnnnnnnnnnnnnnnnnnnnnnnnnnnnnnnnnnnnnnnnnnnnnnnnnnnnnnnnnnnnnnnnnnnnnnnnnnnnnnnnnnnnnnnnnnnnnnnnnnnnnnnnnnnnnnnnnnnnnnnnnnnnnnnnnnnnnnnnnnnnnnnnnnnnnnnnnnnnnnnnnnnnnnnnnnnnnnnnnnnnnnnnnnnnnnnnnnnnnnnnnnnnnnnnnnnnnnnnnnnnnnnnnnnnnnnnnnnnnnnnnnnnnnnnnnnnnnnnnnnnnnnnnnnnnnnnnnnnnnnnnnnnttcgccccacggcaccagaggttcaatttcacccatcacggtaatccccagcagctgcgcaagctgaacgttatttcccagttcaggatgcgcatcgagcggcaggtgatagccgtacagattgatgtcattcgccagcagcgttttgagtcggttgcgcttcatgccgcgaataatcggtgattcgtttttccagaaataaccgtggtggacaatcaccgcatcggcttcctgacgcaccgcctcatccagcagcgcctggcttgccgtcacgccggtgatgattttttgcaccgcctcgcgcccctccacctgcaagccattcgggccgtagtcgctaaacgaagccgtgttgagtttttcgttaatcaggcgttccagttcactgtttttcatcatcattctctcaaacttttcgggcggcttcgtacgccgccagcgtggcgacgcgcgcctgtttatggtcgacaatgggacggggatagttcagggtaacacgctgtttatccgcccatacccagggttcatgaatggctttggccgggacatcctttagctcaggcagccagcgacggataaactcgccgtcggcgtcaaatcgttgtccctgcgtggtcggattgaagatccgaaaatagggagccgcatccgttccggtggaggccgcccactgccagccgccgttattcgccgccagatcgccatcgatcagctgagagataaaataacgctctccggttcgccagtcgataagcagatccttcaccaggaagctggcggtaatcatacgcagacggttatgcatccacccggtttcattgagctgccgcatagccgcatcaacaatcgggaagccggtgagcccacgctgccatgctttaagcagcttctcattcgactgccactgtacctgttcggtccagtgaataaagggccgatgtttacacaaatcaggatgatacgtcatcagatggcgataaaactcacgccagatcagttcgttcagccacactgcgcccgccccccccgtctaagccctgaggctgttccgccagcaggcgatgtaaacactggcgcggagagagcgcgcccagcgctaaacaggccgacaagcggctggtgccttcagtcgctggaaaatcccgacgcgcctcgtactctgccgccccctgcgtgcagaactgacgcaaccggtcaatagctgctttctcactggcggggaataccgtttcatcgaacgactgctggggataattcagcctgatcgccggcatatccgttatcgtttcccctctcacggtcggggcggtaacgcactcaggtagtccctctttcaggcgtttgataaaggcatttttaaacggcgtgaaaactttatacatctcgtggctaccggtcattacgctgcccggcgcgagcatcacgctgtcatcaaagccttcacagaccacgcccgcaagggttttctccagctgacgatcccgctgttgctcgttgaattcatactgatagttgtaataaagatgcgttactgcgtgctgctggcagattgcctgcaccgtctggcgctgcgcggcaaaatcatgggcctctttatagatcagcggaatgcctttttcagccagtgaatgttgcaggtcattcagatacgcgctgagtagtgccgcttgccggggcgccatgtcatgctgccgccactgttcaggcgtggcgataaacagggccagcacattcgcgtctttagcgcggcaggccgccgcgagagcgaagttgtcgtgaatgcgtaaatccgcgcgaaaccaaaccagatgggtgggcataaaactcctggcaattgtccattatgtccgtaagggcatgccgtaaaaggaaaaaggcacgcattgaactactttgccatgaagtgtagacgggatgaaataaaaaaggccgcccgaggcggccttaacgctacttgtcctgcgctatcagggtaaaggcaataaacacatccggtttatcactctttacaacgagtgcgctggcgacaatgaacgcgatgcataaatagcgtttcactatgcggtccctgctgctaaccgctccacctatcaccaccggtgataaatcggtggacacaagcccgggtaggtgggctgctttacggctatggatacacctttcccaggaccgatgcccatttgcgagatggcggaaagggacgtggcatcataattagcaccaacgccaaaagtaagttatttcagtaaaattaggaatttataaaggtgaagtggattgtgaactttttaaagaagggtatgataaaaatcccgggtaggggctgcaagattacccaacggaccgcgaatcccgagggacaaaaaaaccgccacattgctgtaggcggtttttttatggctacgatgtcacaccgtatcagtagaaatcgcaggtcgctttctcggcctgatccatccacaccggcttctcgctggttttcgcccagacgcggtgcaggtaactgtagaaacgtgcgcgatctttccagaacagcatcaccggcagggccaacacgccagccactacggcgaaagtgcgacgcatgaaaatgatatgagccggaaactctttataaagatccataattttctcccctgtagttggccggaaaccgtctccggaaaatgtgaaatctgtgacctggttaaaataataccgctttgtttgtaattttactactcatccgaccacttattttcatccatttcgtgaatatttacattcccgcctgtaattaagttacaaaaaagttaacgatttacttaccaatagttaaattgtggtctttccctttttatactttttttacacctgcccttctgatttttgcgaaatctttgcgccataaatcctaccgtttgtacaacaacaaaagtcacccggaggtggattgtgagtgcaggtctgattgccggcatcgtgctggtgttcctgttattgggttatctgatttatgccctgattaatgcggaggcattctgatggctgctcaggcgtttttgcttattgccagctttatactggtgctgtttgtgctcgccaggccgctgggaacagcgctggcgcggctgataaacaacgtgccattgcctggcacgcgaaatattgaaaacgtgctctggcgcatttcaggtatcagcgaccgggaaatgaactggcgccagtacctgatggcgatactgcttctgaatatcctggggcttattgccctctttacgctgctgatgctccagggcagtctgccgttgaacccgcagcagttaccgggtttatcctggcatctggcgctgaacacggcggtcagctttgtcaccaacaccaactggcagtcttacgccggtgaaaccacgctcagctacttcagccagatggccgggttaaccgtgcaaaactttctttctgcggccagcggtatcgcggtgatcttcgccctgacgcgcgcgtttgcccgtcagaatgtcagcaccctcggcaacgcctgggttgatgtcacgcgcatcaccctttggatcctggtgcctgttgcgctgattattgccctgttctttattcagcaaggcactctgcaaaacctgctgccttataccccttacacctcgcttgaaggggccagggaactccttccaatggggccggtggcgtcgcaggaagcgatcaagatgctgggcaccaacggcggcggcttcttcaacgccaactcatcgcatccgtttgaaaacccaacggcattaaccaattttgtacagatgctggcgatcttcctgatccccgccgcgctctgcttcgcctttggcgatgtggttaacgatcgccgccagggacgtacgctgctgtgggcgatgtcgttgatcttcgtggtctgcgtagcactggtgatgtgggccgaatggaacggcaacagccacttcatgcagctgggggctaacagcaatatcaacctggaaggcaaagagagccgcttcggcattcttgccagcagcctctatgcggtggtcaccacggcggcctcctgcggggcagtgaacgccatgcacgactcttttaccgcgctcggcggcatgatcccgatgtggctgatgcagattggcgaggtagttttcggtggggtcggttcggggctgtacggcatgctgttgttcgttctgctcgccgtgtttatcgccgggctaatgatcggtcgcacgccggagtatctcggcaaaaaaatcgacgtccgcgaaatgaaattaaccgcgctggcaattctggtcacccccacccttgtgctgctcggtaccgcgctggcgctgatgaccgacgccgggcgcagcggcatctttaacccgggcattcacggctttagcgaagtgctttacgccgtttcgtctgccgccaacaacaacggcagcgcctttgcagggttaannnnnnnnnnnnnnnnnnnnnnnnnnnnnnnnnnnnnnnnnnnnnnnnnnnnnnnnnnnnnnnnnnnnnnnnnnnnnnnnnnnnnnnnnnnnnnnnnnnnnnnnnnnnnnnnnnnnnnnnnnnnnnnnnnnnnnnnnnnnnnnnnnnnnnnnnnnnnnnnnnnnnnnnnnnnnnnnnnnnnnnnnnnnnnnnnnnnnnnnnnnnnnnnnnnnnnnnnnnnnnnnnnnnnnnnnnnnnnnnnnnnnnnnnnnnnnnnnnnnnnnnnnnnnnnnnnnnnnnnnnnnnnnaactgtttgctggcgttctgcatgttcatcggacgtttcggcgtgattattcccgtcatggcgatcgctggaacactggtgaataagaagatccagccgaccaccaccggtacgttaccgactcacggcgcgctgttcgtcggcctgctgattggcaccgttttgctggtgggtgccctgacctttatccccgccctcgcgttaggcccggttgcggaatatctctctttacgctgattttgcggagaatttgtcatgagtcgtaaacaactggccctgctcgaaccgacgttagttcgtcaggccctcatggatgcggtaaaaaaactgagcccgcgcgtgcagtggcacaacccggtgatgtttattgtctggactggaagtttactcaccaccgcactggcgattgccatgggaacgggacacctttcagggaatgcaacctttaccgccgccatcagcctgtggctgtggtttaccgtgctgttcgccaactttgccgaagcgctggcggaaggccgcagtaaggcgcaggccaacagcctgaaaggggtaaaaaaaaccgcctttgcgcgcaaattacgcgaacctaaatacggcgcgcagatggaccacgttccggcggatgagctgcgtaaaggtgacgtggtgctggtggaagctggcgacatcatcccctgcgacggggaggtgatcgagggcggcgcgtcggtagacgaaagcgccattaccggggaatccgcaccggtgatccgtgagtcgggcggagatttcgcctcagttaccggcggaacgcgcattctttccgactggctggtgatccggtgcagcgttaacccgggcgaaacctttctcgaccggatgatcgccatggtggaaggcgcacagcgtcgtaaaacgccgaacgagatcgccctgaccattctgctggtggcgctcaccattgtcttcctgctggcaacggcgaccctgtggcccttctccgcctacggcggtacagcggttagcatcaccgtactgatcgccctgctcgtctgtctgatccccaccactatcggcggcctgctttccgcgattggcgtggcggggatgagccggatgctgggcgcgaacgtcatcgccaccagcggacgcgccgttgaagcggcgggtgacgtagacgtgctgctgctggataaaaccgggaccatcaccctgggcaatcgtcaggcctctgactttctacctgctcccggcgtggatgaaaaaacgctggctgacgcggcgcagctttcctcgctggccgatgaaacgccggaaggccgcagtatcgtgatcctcgccaagcagcgctttaacctgcgccagcgcgacgttcagagcctgcacgccacgttcgtgccttttacggcgcaaacccgaatgagcggaattaacattcaggaccggatgatccgtaaagggtccgttgatgccattcgccgtcatattgaagccaataatggacacttccccccggaagtcgaccatctggtggaaagcgtggcgcgtcagggggcaaccccgctggtggtggcggaaggtgcgagcgttctgggggttatcgccctgaaggatatcgttaaaggcggtattaaagagcgtttcgcccagatgcgtaagatgggcattaaaacagtgatgatcaccggggataaccgtctgactgcggcggccattgccgccgaagcgggcgtggatgatttcctttccgaagcgacgccggaagcgaagctggcactcattcgccagtatcaggcggaaggccgtctggtggcgatgaccggcgacggcaccaacgacgccccggcgctggcgcaggccgacgtggcggtggcgatgaactccggtacccaggcggcaaaagaggcgggcaacatggtggatctcgactcgaacccgaccaagctgatcgaagtggtacatatcgggaagcagatgctgatgacgcgcggctcgctgaccacgttcagtatcgccaacgacgtggcgaagtatttcgccatcattccggcggcttttgcggcaacctacccgcagttgaatgccctgaacgtgatgcacctgcactctccggcctcggccattttgagcgcggtgatcttcaacgcgctgattattgtctttcttattccgctggcgctgaaaggggtgagctataagccgctgacggccgccgccatgctgcgccgtaacctgtggatttacggtctgggtgggctggtggtgccctttattgggatcaaggttatcgacatgctgttaacgctgttcgggctggtttaaaaggtggatccaatgacgatgttacgtcccgctatactgttgtttattctgctgtctctgattaccggcgggctttacccgctgatgactaccgcgctgggccagtggtggtttaaagatcaggccaacggctcgctgattatccagaacggtgaaaaccgcggctcgcgtctgattgggcagaactttacggacccgcgctacttccagggacgcccttccgccactgcggaaagcccgtataatccaatggcctccggcggcagcaatctggctggcagtaatcctgacctggacaaagccgttgctgaacgcgttgccgccctgcgcgccgcgaatccgcaggccagccgtgaggtgccggttgagctgatcaccgcttccgcgagcgggctggattacagcctgacgccggatgcggtggtgtggcagatcccacgcgtggcagccgcccgtcagctgaccgtcgagcaggtgagccagctggtcgcagagcatacgcaaaagccgctggtcagcttcatcggcatgccggtagtgaacattgttgagctgaatctggcgctggacgcgctaaggaagaactaaatgaccgacgagcccatgcgcccggatccggacaggctgcttgaacagacggctgaagcccaccgcggcaagctaaaaattttcttcggcgcctgcgcgggcgtcgggaaaaccttcgccatgctgacggaagcccagcggcttcgggcgcaggggcttgatattctcatcggcgtggtggaaacccacggtcgcaaagagacggctgcgctgctgacggggctggcgacgcagccgccccagcgtatcagccatcgcgggcggctggtcactgagtttgatcttgatgccgccctcgcccgccgccctgccctgatcctgatggacgaactggcgcacagcaatgcgccaggctcccgccatccgaagcgctggcaggatgttgaggagctgcttgaggcaggcattgacgtcttcaccacggtgaatgttcagcatctggaaagcctgaacgacgtagtgagcggcgtaaccggtatccaggtgcgggaaaccgtccccgatccgttttttgattctgccgatgaagtcgtactggttgacctgccgccggacgatctacgccagcgcctgcacgaaggcaaagtgtatattgccggccaggccgaacgcgccatcgaacattttttccgcaaaggaaacctgattgccctgcgcgagctggccctgcgccgcaccgccgatcgcgttgatgaccagatgcgcgcctggcgagacctacagggacaagagcgcgtctggcacacgcgggacgccattctgttatgcattggtcacggcagcggcaacgaaaaactggttcgcaccgccgcccggctggcagcgaaatttggcagcgtctggcacgcggtctacgtcgaaacgccgcagctgcatggcctgccagaaaatcagcgtcgcgccattttgagcgcgctgcggctggcgcaggagctgggtgccgaaaccgccaccctttccgaaccgcaggaagataaagccattctgcgctacgcgcgcgagcacaacctgggcaagattgtcattggacgtcgacagcatcgccgctggtttagccgcgaatcttttgccgacaggctggcccgccgcgcgccggatcttgatttagtcatcgtcgcgctggatgacaagcccgcccctctgcccaaccgtacgccggatgctcgcacctttggcgataaatggcgcattcagatccggggttgcctggtggccgtggtcctttgcgccctgattacggtgattgccagccagtggctcatcgccttcgacgccgccaatctggtcatgatttatctgctcggcgtcgttgtggtcgcgctcttttatggccgctggccgtcggtgctggcaacggtgatcaacgtcatcagcttcgaccttttttttatcgctccgcgcgggacgcttgctgtctcggacgtgcagtacattctgacctttgccgtgatgcttaccgtcgggctggtgatcgggaatctgacggcaggcgtacgctaccaggcacgcattgcccgctatcgcgagcagcgcacgcgccatctgtatgaaatgtcaaaatcgctggcggttggccgcacgcagcgagatatcgtgcagaccagcgagcagtttattcgttcgacctttcatgccagtaacctgattttgctccccgacgaacaggggcgccttcgcccgctgacctccccttcggggatgacgccctgggatgaagcgattgcccgctggagtttcgataaggggttacctgccggcgccggcaccgacactctgcccggcgtgccttaccagatcctgccgctgcgcagcgcggataaaaatcacgggctggtcatcgtcgagccgtctaacctgcgtcagctgatgatcccagagcagcagcgcctgctggaaaccttcaccctgctggtcgccagcgcccttgaacggctggcgctcaccgccagcgaagagcaggcgcggctggcaagcgagcgcgaaagtattcgcaattcgctgctggcagcgctgtctcacgatttgcgcaccccgcttaccgtgctgtttggccagtccgaaattctgacgctggatctggcggcggaaggatcaaagcacgcgatgcaggccagcgaaattcgccagcacgtgctgaataccacgcgcctggtgaacaacctgctggacatggcgcgcattcagtccggcgggtttaacctcaaaaaagagtggctcacccttgaggaggttgtcggcagtgcgctgaagatgctggagccgggtctcggcgggcgccatattgagctggacatgccggaacccctaacgttaatccatgtggatggcccgctgtttgagcgcgtgctgattaatctgctggaaaacgcggctaaatacgccgggacaaaggcccggctggggattgctgccagggtggataaacgtgtgctgcggctcgacgtctgggataacgggccgggtattccggccggtcaggagcgcgccatattcgaaaaatttgcgcgcggtaataaggaatccgccattccgggcgttgggctgggtctggcgatctgccaggcgattgtcgacgtgcatggtggcaccatttccgcagagaaccgcccggaaggtggggcacgcttttgtgttacacttcctcttgaaaccccaccagaacttgatgaattaccagaggatttgtgattaacgttctgattgttgaagatgagctcgctatcagccgatttctgcgtaccgcgctggaaggcgacggcttgcgcgtgcatgaagccggtacgcttcaacgggggttaattgaagccgccacccgcaagccagatctggtgatcctggatctgggacttccggatggcgacggcatcgattttattcgtgaggtgcgtcagtggagccagatgcccattctggtgctctctgcccgcaccgaagagacggataaaatcgccgcgctggatgccggagcggatgattatctgatcaaaccgtttggcattggcgagttacaggcccggcttcgtgtggcgctgcgtcgacacagtgccacgtcctcttccgatccggtgtacgcctttggcgatatccgcgtcgatcttgccgcccgccgcatcgtgcgaggggaagaagagatccaccttacgcctatcgaatttcgtctgctggccgtgctgctcaataaccacggaaaagtgttaacgcagcgacagctgttaagccaggtctggggaccgaatgctgtcgagcatagtcactatttacgcatttatatgggacaccttcgccagaaacttgaagccgatcccgcgcgtcctcgtcatttattaacagaaaccggtatcggatatcggtttatgatctgaataagtattcactttaattttaaataaaaaacataccagccttaatatagccatgaaaataacgatgagtttattttcatagctatatccgccctctttaaacacaattaaaacatcaaattaacaccgaaccaacaaaacagcattttgatctgcgttattcactcaaaacgactaattatttctgaaatgatcggttattggtgatctgtttcacagttaatccctttctcctggataaaatgaccatgctttcaattactgaaaggaaactgaacatggaaaacaataatcgtttaatgccccatataaggcggacaacacatatcatgatgtttgcccaccgtaactgttttgactttcatctctttaacgcccggtagtccttcgacttctggcgcatctgcttacaggttatcctgaaaaacgctattttacaggctgttgcctgtgaacacctgcgctcatttcttgtgattcagattctccgcaaccgggcggactgaattctactcagcaaaaaagcaattaactgatttcgtatcagcggacacgctttgcttttttttccggaaataatcgatttctttaccgcaagaagtcgagggccccatattgcctgaaataaagagataaagatgaaaacgttaaaaattgccgtcagccgtgcctgccctgaatgctttaccacttcgcgcgacatcgtggatatcaccgcatcagattatattgatgtggcagccgtggttctggccgtcagcgatattttcaatggcgccatagaagaaatagaagccacgggattcggcatcccggtgtttattgccacgcataaagaagaaagggttccggctgaatttctgtcgcgtattcacggcgtttttgagtactccgacaccagcaatgcgtactacggacgccagcttgaagcggctgcgcagaagtacgaaacccagctccgcccgccgttcttccgcgcgctggtcgattacgtccagcaggggaacagcgcgtttgactgccccggacatcagggaggccagttcttccgccgccatccggccggaaaccagtttgtcgatttctttggcgaaacgcttttccgcgccgatctgtgcaatgccgacgtggcaatgggcgatctgctgatccacgaaggcgcgccatgcatcgcccagcagcatgcggcaaaagtctttaatgcggataaaacctacttcgtgctgaacggcacctcctcttccaacaaggtggtgctcaatgctctgctcacgccaggagatctggtgctgttcgatcgcaataaccataaatctaatcaccacggggcgctgttacaggcgggcgcgacgccggtgtatctggaaacggcgcgcaacccgtacgggtttatcggcggtatcgacgcacactgtttcgacgagagctacctgcgggagctggtgtcagaggtcgcgcctggccgtgcgcgggatgaacgtccgttccgtctggcggtgatccagctgggcacctacgacggtaccatttataacgcccgtcaggtggtggataagattggtcacctgtgcgattacattctgtttgactccgcctgggtgggttacgagcagtttatcccgatgatggccgactgctcgccgctgctgctggagctgaacgaaaacgatccgggcattctggtgacccagtcggtgcataagcagcaggcgggcttctcgcaaacctcgcaaatccataagaaggacagccacataaaaggccagccgcgctatgtcccgcataaacgcctcaacaacgcctttatgatgcacgcctccaccagcccgttttatccgctgtttgccgccctggatatcaacgcccgcatgcatgaggggcaaagtgggcgcaacatgtggatggactgcgtggtgacgggtattgaagcgcggaaactgatccttcagaactgtcagtttattcgtccgttcgtgccggagacggtggatggccgtccatgggaaagctgggatacggcagagattgcgaccgatctgcgcttcttccatttcgttccgggcgaacgctggcacgcctttgagggatacgccgagcatcagtattttatcgatccctgcaaactgctgctaactacgccgggcatcaacgcccgcaccggtgagtacgatgatttcggcgtgcccgccaccatcctcgccaacttcctgcgtgaaaacggcatcgtgccggaaaaatgcgacctcaattccattctgttcctgctcaccccggcggaggacatgggcaaattgcagcagctcgtcgcccagctggtgcgcttcgaaaaactgctccagagcgatgtgccgctgaaagaggttctgccctctctttataagcaacatccggaacgttatgcggattataccctgcgtcagatttgtcaggagatgcatgacctctacgcccgccataacgtgaagcaactgcaaaaagagatgttccgcaagtctcacttcccacgcgtcatgatgaacccgcaggaggcgaactatgcctatctgcgcggtgaggtcgagctggtgtccctgcgcgacgcggaaggccgtatcgccgcggaaggcgcgctgccttacccaccgggggtgttgtgcgtggtgccgggagaagtctggggcggttccgtgctgcgctatttcgccgcgctggaagacgggatcaatctgctgccgggttttgcgccggagttacagggggtttacgtcgaggagtgtgacggtcgcaaacaggtgcgctgctacgtcatcaaacaacctgccgctcagccatcgctgctgaaaggagaaaaattatgagtaaggccaacaagatgggcgtggtgcaactcactattctcaccatggtgaatatgatgggttcggggatcatcatgctccccaccaagctcgctgaagtggggacgatttcgattatctcctggcttgttaccgccgtgggttcgatggcgctggcgtgggcgtttgccaagtgcggtatgttcagccgcaagtccggcggcatgggcggctatgccgaatatgcgtttggtaagtccggtaactttatggcgaactatacctatggcgtgtcgctgctgatcgccaatgtggcgattgccatttccgctgtcggttacggcacagagctgtttggcgcgacgctgaccccggtgcaaattgggctggcgaccatcggcgtgctctggatctgcaccgtcgctaactttggcggcgcgcgcatcaccggacagctcagcagcatcaccgtctggggcgtcatcatcccggttgtcggcctgtgcatcatcggctggttctggttcagcccgacgctgtacgccaattcctggaatccgcatcacgtaccgttcttcaccgccgtgggatcgtccatcgccatgacgctgtgggccttcctcgggctggagtcggcctgtgcgaatgcggaagtggtggaaaacccggagaaaaatgtgccgatcgcggtactcggcgggacgctgggggcggcggtgatctatatcgtctcaaccaacgtgattgcgggaattgtgcccaacatggatctggctaactccacggcgccgttcggactggcgtttgcgcagatgtttacgccggaggtagggaaagtgatcatgggactgatggtgatgtcctgctgcggctcgctgctgggctggcagttcaccatcgcccaggtattcaaatcttccgctgacgaaggttatttcccgaaaatcttctcccgcgtcaccaaagcggatgcgccggtgcagggtatgctggcgattgtgattttccagagcggtttgtcgctgatgaccatcagcccgtcactgaacagccagtttaacgtgctggtcaacctggcggtggtgacgaacatcattccgtacattctgtcgatggcggcgctggtgattattcagaaggtggcgaaggtggatccgcgcaaagcccgggcggccaatatcgtggcgctgattggggcgatttacagcttctatgcgctctactcgtccggtcaggaggcgatgctgtatggggcgatggtgacattcatgggctggacgctgtacggtctggtctcaccacggtttgaactgaagaataaacatagttaaaaaagaagcccggtggcactggcgcttaccgggcctacgaggtcaatgcaaaacggcaaccctacgaggttgnnnnnnnnnnnnnnnnnnnnnnnnnnnnnnnnnnnnnnnnnnnnnnnnnnnnnnnnnnnnnnnnnnnnnnnnnnnnnnnnnnnnnnnnnnnnnnnnnnnnnnnnnnnnnnnnnnnnnnnnnnnnnnnnnnnnnnnnnnnnnnnnnnnnnnnnnnnnnnnnnnnnnnnnnnnnnnnnnnnnnnnnnnnnnnnnnnnnnnnnnnnnnnnnnnnnnnnnnnnnnnnnnnnnnnnnnnnnnnnnnnnnnnnnnnnnnnnnnnnnnnnnnnnnnnnnnnnnnnnnnnnnnnnnnnnnnnnnnnnnnnnnnnnnnnnnnnnnnnnnnnnnnnnnnnnnnnnnnnnnnnnnnnnnnnnnnnnnnnnnnncccgcaccagatcacgacttatgcgtttttcagcacttcgctgacaatctctaccgcttctttctcaatctgctggcggtgctcagcgccgaggaagctttcgcaatagattttgtacgcatcttccgtaccggatggacgcgcggcgaaccagccgttttcggtcatcaccttcaggccgccgatcgatgcgccgttacccggcgccgccgtcaggcgcgcggtgatcgggtcaccagccagggtactggcactgaccatctccggagagagttttgacagagctgctttttgcgcagacgtggcgccagcctggatacggttatagcttggcgcgccaaaacgttccgccaactcgttgtaatgttcctgcggattcttaccggtgaccgcggtgatttccgccgccagcaggcacatgatgatgccgtctttatcggttgaccatggagtgccgtcgaagcgcaggaaggatgcccccgcgctctcttcaccgccaaagccgaagctgccgtcgtgcagaccgtcaacaaaccacttgaagcccaccggcacttccaccagcttgcggcccagcgcgtcgaccacacggtcaatcatggcggaagagaccagcgttttacccaccgcaacctctttgccccactgcggacggtgctggaagagatagttaatcgcaacagccaggtagtggttcgggttcatcagcccggcaggggtgacgataccgtgacggtcgtagtccgggtcgttggcaaacgccagatcgaacttgtcgcgcagcgccagcaggccagccattgcgcattcggaggagcagtccatacggatcgcgccgtctttgtccaggtgcataaagcggaaggtctgatcgacgtgatcgttcacgatggtcagatccagcttgtagtgctcggcaatgcgtttccagtattcaataccggagccgcccagtggatccacgcccagcttcagaccggctttctggatagcggccatatcgacgatatccgccagcccttccacgaacggctgcaccagatcctgctctttcacgtggccggaggccatggcttcatccagcgagatgcgtttcacaccgttcagaccgttagccagtaacgcgttggcacgatcttccaccactttcgtgacgttggtatccgccgggccaccgttaggtgggttgtacttgatgccgccatcttccggtgggttgtgggaaggggtgatcacaatgccgtcagcctgcgcgccaccttttttgttgtgtaccagaatagcgttagaaaccgctggcgttggcgtaaaaccgttgttctcctgaacaatcacgtctacgccgttcgccgccagcacttccagcacggagataaaagcaggttcagacagggcgtgggtatctttccctacatagcacggaccggtgacgccatttttggcgcgctcttccgcgatggcctgagcaatggccagaatgtgcggttcgttaaagctgtggcgcgccgcactaccgcggtggccagatgtaccaaacttcactgcgtgttctgcgttgcccaccaccggcttcagcacgtagtactgcgcggtcagttgagcgacgttaatcaaatcgctttgttgtgcaggttgtcctgcacggctgtgatttgccattgcctggtccttctgatgcaagggttaaattgtaccgcaaaccttttcgatcaattccgccgggaactgcatggactgcatgatatgttcgatcatgctgcacttacggcccgtattggtgttggtgatcacccagtatggtgtaccgggaacgtgtttgggcttggtttggttgccattttgcagcagggtctgctcgtcgcctgcgaagtaaacgcgcgtgcgaccgtgcagcgactctgacgcttctgcaaatgcgttgttatccagtgagtaaagtgtagacagcaccagcataaagcggttaaccgcctttttctgctcggcatattcatcggacagcagcagctcgcgcatcgcgcgcactttgtcttttgccggcatgacggcaggttttacttgtgcaacaacgctcggctgagacacgacatctttagtgacaggagtgggctgtgaggcggcggaaattttaagcatgcgccgtaaaatgtcggacgcgctctccccaatatgccgcgtctggctggcaatatactgatagagttcgtcatcaacttcgattgttttcatcttaatccagtgcgatatcttatctgaatacaagtcgttgagattataaggtcaaatcccaacagcggatagcgtcaaaccaggttggcggcaaaagtcagattaaactggatccttgcccccgggcggcagaatggtcaacatgataccctaacctgacaaacctaaaaaaagaactttgccatgaaattgaatacccgagcgcaaactgcacaatcgccgaacaataattctcccatcgtactggttcacggcctgtttggtagcctggataatctgggtgtgcttgcgcgcgatttagtggccgatcacgcgatcctccaggttgatatgcgcaatcacggtctttctgggcgctcggaggagatgacctacgcagccatggcgcaggatctgcgggacaccctcgatgcgaataatatccagaaagcgacgcttatcgggcattcaatgggcggcaaagcggtgatggcgctcactgcgctggcccctgagcgaatttccgggctggtggtcatcgacgttgcgcccgtcaattacgacgttcgccgtcacgatgagatttttgccgccatcaatgcggtcaccgaagcgggtgtcgcaacccgccaacaggcggctgccgttatgcgtgagcatcttgatgaggaaggagtagttcagttcctgctgaaatcgtttgttgacggacaatggcgctttaacgtcccggtattgtgggatcagtattcgcatattgtgggctgggaaaccgtccccgcctggccgcaccctaccctttttattcgcggcggcaactccccttacgtcactgatgcgtaccgtgacacgctgctggcgcaattcccgcaggctcgcgctcacgttattgcgggtgccgggcactgggtacacgcggaaaaaccggatgccgtcctgcgcgccattcgccgctatcttactgatacagcgaattgattaaaaagccagcgaccggaagacgacgggcttccagtcgttggcgtgtggatttgggtgatgtatgatggcgcgcttatcgcccgggcattagcagggcggcgtgtttcccccgaagtctcagaatcatggccaaagaacaaacggaccgtacgacactagatctgttcgcgaatgagcgtcgaccgggacgaccgaaaacgaatccgctttcgcgcgatgaacagctgcgtatcaataaacgcaaccagcttaaacgcgataaaaatcgtgggcttaagcgtgtcgaactgaagcttaatgccgatgccgtcgatgcgcttaacgagttagctgacgcgcgcaacatcagccgcagcgaactgatcgaagagatgctgatcgcccagcttgagacgttacgcggcaaggcgtgagtcagaaaatccccaatattacctttttcatgtagcacagagtgcagtcctgcgtgatagctgtttccgcagggttgcctgttctgctattattgcccttatccgtggacaatttgcgccaccataccattaagtttcaagaggttattttactcatggcaatcatcggcattttctttggcagtgataccggcaatactgaaaatatcgcaaaaaacattcaaaaacagctcggtaaagacgttgctgatgtgcatgacatcgccaagagcagcaaagaagatctcgagggctatgacatcctgctgctgggcatcccgacctggtactacggtgaagcacagtgtgactgggacgatttcttcccgacgctggaagaagtagacttcaacggcaagctggttgccctgtttggctgtggcgatcaggaagactatgctgagtatttctgtgatgcgctgggcactattcgcgacatcattgagccacgcggtgcggcgatcgtcggtcactggccaacggcgggttaccatttcgaagcgtccaaaggtctggcagatgacgatcacttcgttggcctggccattgatgaagaccgtcagccagagctgaccgctgagcgtgtagaaaaatgggttaagcaggttcgtgaagagctgaacctggacgatatccttaacgcctgatatccctgcggcgcaactccgtttgcgcccgttttccaggtaaaaccgattaaattaattgctacaaacttttaactttttcgcccagacctgtacaatatccccctggtaaaaagtgggtgccatcgaacaagtttgttggtgataccacgtttttataagcatactttgcttgagacttgcagttttcatttagccatggcagttctataatgagacgcattatcccaagtgcattttctgtcacttcttcttttgaagtgaatcgtttagcaacaggacagattccgcatgactgacaacaataccgcattaaagaaagctggcctgaaagtaacgcttcctcggttaaaaatccttgaagtgcttcaggggccagacaatcaccatgtcagtgcggaagacctttataagcgtcttatcgatatgggtgaagagattgggctggcaaccgtctatcgtgtgctgaaccagtttgatgacgcgggcattgttactcgtcataatttcgaaggcggtaaatccgtgttcgagctgactcagcagcatcaccacgatcacctgatctgcctcgactgtggcaaggtcattgaatttagcgatgattccattgaatcacgccagcgtgaaatcgccgcccgtcatggcatccgcctgaccaaccacagcctgtacctgtacggtcactgcgctgaaggcgattgccgcgaagacgaccacgcgcacgacgcgaaataatatcgtgttcatactctgagccagccgtaaggttgnnnnnnnnnnnnnnnnnnnnnnnnnnnnnnnnnnnnnnnnnnnnnnnnnnnnnnnnnnnnnnnnnnnnnnnnnnnnnnnnnnnnnnnnnnnnnnnnnnnnnnnnnnnnnnnnnnnnnnnnnnnnnnnnnnnnnnnnnnnnnnnnnnnnnnnnnnnnnnnnnnnnnnnnnnnnnnnnnnnnnnnnnnnnnnnnnnnnnnnnnnnnnnnnnnnnnnnnnnnnnnnnnnnnnnnnnnnnnnnnnnnnnnnnnnnnnnnnnnnnnnnnnnnnnnnnnnnnnnnnnnnnnnnnnnnnnnnnnnnnnnnnnnnnnnnnnnnnnnnnnnnnnnnnnnnnnnnnnnnnnnnnnnnnncctggtaatccatcacgcgaacattttcctgcgtcgcaaactgctcatgcgctttctcttttttcagcacattcagcacgctctggcaggcttcaatcttctctggcgatccttgtgctgtattgatgcaggcgctatacgcctccttcagacgggagtcttctttctgcgcctgatcctgcgcacacgccaccagccccgatgccagcagcgcaacgattaccatttttttcatcatatgcagtctccatgcaggcgggatttcgcccgcctgcgtgttcatcagaagattgtgaatggcgcaatgaccatgaatttcacgtcacgttcatcctggaagatgttgccgtaaccgcccgcgtagctcgtgatatcggagtggttgtcatactgggtgaagtgcagtttgaacatcgtgcctttcgcacggccctcctgaagggtgtaaatcgcatccagactgtatgaagactctttcagacggtagttcggatcgtagtaggcgtctggcgtagccatatctgctggcttcgcgtcccaggcgtacgcgtaggacgcacccactgcccagccaggcaggttccagttcttcaggtcatacattgcgccgaagaagaccgccttttcgccgtcggcgttgaagtcagagcggttatcccaccagatatccagacgaccattggaagaggcgtaggttggcgtcatacgttgcaggaagtagccctgctgcccttcagccttgacccatgttccctccagacgtaaatcaacctgacctaccttgtagccgaaggtcagcgcctgtaaccacgcggtgccgtcatagatatcatttacgctgccatcactgactttgtcgcgcgtaccgtagaactgatagctggtgctcagcgggctacccgcgatatcaaatttgtagctggctttagcaaagtactgatcgatatagccttcagcctgaccaaaagcagcttccagcaccagatcgtttttgaagtcgtacttcgcccccagcgagtggagataatcaactttggtttttttatcgttctgatagaacttgtccatctcaatgtgccacggcgctttgtactcgttggtccacatataggagaagctcaacgcccccgcatcgccgtagtcaaaattagcaccggcttccgcaccctgataagtgcctggcataaagctccagtgcggtgctaacagcgtctgaccggttggctggatataacctccacgcgcccagaccggaccatatttgaattttgcagccgctttatacaggctgattccgcttttatcgccggaccagtcttcgtcgtaggctttattgctggaggagaacgcaatttcgttcggatggccgctgtcgccattttcggccatttcaattgcggtgaacgctgcaatatcgatcccgaacatatcggcggcatatcccgactgaaaatccaggttggcgttccaggtcgagtgagaaaggttggttttgtatttatcttcagtgacgtctttacggtcacgctcacgctgccagtaataaataccgcccgtgagggtggaatcttcaatgaaacctgctgcttttgcctctggcgcaaccaccaggcccgacattgctgtcacaccggcgatagccagcgccagcgcactacgtttgccactgaacgtacgcatagattattcctctttgacgaattaaaacgccttaaacggcgaaaaacagaaaagaccaagtggtcaggggtagtcagaaataccctcgaattaactaccgtctttaggttatttttcgcgacgcgaattatcaatgcttttaatcaggcaaaagtcaggattatgacgaagagcacatatttcgtagtgctttgtaacatttaccgggaagcaagtactggcgggggaatacgctaattttcagtaagtaacattgatattgtgattatatttttcagcgtttctgtttttggaaaacaacaaacttttttaaataaaataagtagcaccacattgacctggaatgttggctttaattcatcatcccgatgcttaacgacatgatcgttaaataaaaaaacgccgcattatgcggcgtttgtttctcattgaccatgccagcgtgattattcgccgatcttagtccaggtatcacgcagaccgacggtacggttaaataccggtttttccgccgtgctgtaacggctgtccaggcagaagtaaccctcacgttcaaactggaacgctttaccggcttcagcggctttcagagacggctcggcatacccctgcttgataatcagcgactcagggttgataaccgccaggaagtcctccgcagcgcctgggttaggtacgctgaacagacgatcgtagagacggatctcaaccggcagcgcatgctgcgcgctcacccagtggatcacacctttcactttacggccatccgccggatctttactcagcgtctctgcgtcgtacgtacagaagatggtcgtgatgttaccttccgcatctttctctacgcgctcggctttgatcacataggcgttacgcagacgcacttctttgcccagcaccagacgcttgtactgcttgttcgcttcttcgcggaagtcggcgcgatcgatccagatttcaccgctgaacggcacgtcgcgggtgcccatttccggtttgttcggatggttaggcatcgagaccagttcgcttccaccctgcggatagttttcgatgaccagtttcactggatcgatcactgccatcgcgcgcggcgcgttttcgttcaggtcttcgcgaatgcaggattccagagacgccatttcgatggtgttgtcctgcttggtaacgccaatacgtttgcagaactcacgaatggacgccgaggtgtagccacgacgacgcaggccagagatggtcggcatacgcgggtcgtcccagccttcaacgtgcttgtcggtgaccagcaggttcagcttacgcttggacatcacggtgtattccaggttcagacgagagaattcgtactgacgcggatgcacaggaatggtgatgttatccagcacccagtcgtacagacgacggttgtcctggaattccagcgtgcacagagagtgcgtaatgccttccagcgcatcgctgatgcagtgggtgaagtcgtacatcgggtagatgcaccacttgttaccggtctggtggtgttcagcgaacttaatgcggtacagcaccggatcgcgcatcacgatgaacggagacgccatatcgattttggcacgcagacacgctttaccttcttcgaagccaccggcacgcattttttcaaacagcgccaggttctcttccacgctacgatcgcggaacgggctgtttttaccaggctgagtcagcgtaccgcggtattcacggatttcgtcagcagacaattcgtcgacgtatgccagacctttgttaatcagttcaaccgcataggcatacagctgatcgaaatagtctgaggagtagcagatatcgccagaccagttgaagcccagccattgcacgtcgtttttaatcgactcaacgtattcgatgtcttcttttactgggttggtgtcatcgaaacgcaggttgcactgcccctggtaatcttgcgcaataccaaagttcaggcagatcgatttggcgtgaccaatgtgcaggtagccatttggctccggcgggaaacgcgtgtggactgtggtgtgcttaccactggccagatcttcatcgatgatctgacgaataaagttactcgggcgggcttctgcctcactcatcgtggattcctcaaagcgtaaacaacgtataacggcatatgatcttataagccggacgtagtgacaacccttaaaacgtcccggaagaaaataatgggggcaattgctgcaaaaaaaaagcggcggaggatatcccccgccgctaaaggcatgactctactcaggagcgattacttgcctttaatctcatacagcggcgtctggcctgcaaccacctgaccctgcgcctggatcaccagaccgctgaagtcgtcgatgttgctgcatacgaccgggcttatcatggagcgcgcgttggcattcaggaagtccagatccatttccagaatcggctggcctgccgccacttcagcaccctcttccaccagacgagtaaagccctggccgttcagcgcaacggtatcgatacccatatggacaacgatctccgcgcctttttccgtttccaggcagaacgcatggttggtgttgaagattttcacgatagtaccggcagccggagagaccacggttttgtccgttggtttcaccgccacgccgtcaccgaccgctttgctggcgaacgcttcgtcaggcacctgctcaagcgcaacaacgtcacctgtcaccggagaaaccagcgcagcgatggtcaccgcgttaggcacagcctgcggttttgcaaccggcgcgtcagccactggcgcgttatccgttgaggcggcagcgaccggcccacgggcaaccacttttttcatttcatcgccgatagattcggctttcgcacccacgataacctggatggtttgtttgttcagtttcaccacaccagacgcacccaggcgtttgcacattgcatcgctcacgcgcgcggagtcacctacggtcagacgcagacgggtaatacaggcatcgatcgctttcaggttgtcggtgccacccacagcggcaatgtagttggttgccagctgggttaaaccctcttcggtattgctgttggcttcactggtcacaacatcatctttcgtatcttcgcggcccggcgtcttcaggttaaacatacgaataaccgcgctgaacagaacgaagtagataacgaagaagatcaggcccatcaccatcaggatccagacgttgctgcttgccgccggcaggttgtacatcaacacatagtcgatggcgcctgcggagaaggagaagccagcatggatacccagaagggtggcgacgaacaggctgataccggtcaggatcgcgtgcatcagatacagcagcggagccaggaacatgaacaggaattccagtggctcggtcacgccggtcnnnnnnnnnnnnnnnnnnnnnnnnnnnnnnnnnnnnnnnnnnnnnnnnnnnnnnnnnnnnnnnnnnnnnnnnnnnnnnnnnnnnnnnnnnnnnnnnnnnnnnnnnnnnnnnnnnnnnnnnnnnnnnnnnnnnnnnnnnnnnnnnnnnnnnnnnnnnnnnnnnnnnnnnnnnnnnnnnnnnnnnnnnnnnnnnnnnnnnnnnnnnnnnnnnnnnnnnnnnnnnnnnnnnnnnnnnnnnnnnnnnnnnnnnnnnnnnnnnnnnnnnnnnnnnnnnnnnnnnnnnnnnnnnnnnnnnnnnnnnnnnnnnnnnnnnnnnnnnnnnnnnnnnnnnnnnnnnnnnnnnnnnnnnnnnnnnnnnnnnnnnnnnnnnnnnnnnnnnnnnnnnnnnnnnnnnnnnnnnnnnnnnnnnnnnnnnnnnnnnnnnnnnnnnnnnnnnnnnnnnnnnnnnnnnnnnnnnnnnnnnnnnnnnnnnnnnnnnnnnnnnnnnnnnnnnnnnnnnnnnnnnnnnnnnnnnnnnnnnnnnnnnnnnnnnnnnnnnnnnnnnnnnnnnnnnnnnnnnnnnnnnnnnnnnnnnnnnnnnnnnnnnnnnnnnnnnnnnnnnnnnnnnnnnnnnnnnnnnnnnnnnnnnnnnnnnnnnnnnnnnnnnnnnnnnnnnnnnnnnnnnnnnnnnnnnnnnnnnnnnnnnnnnnnnnnnnnnnnnnnnnnnnnnnnnnnnnnnnnnnnnnnnnnnnnnnnnnnnnnnnnnnnnnnnnnnnnnnnnnnnnnnnnnnnnnnnnnnnnnnnnnnnnnnnnnnnnnnnnnnnnnnnnnnnnnnnnnnnnnnnnnnnnnnnnnnnnnnnnnnnnnnnnnnnnnnnnnnnnnnnnnnnnnnnnnnnnnnnnnnnnnnnnnnnnnnnnnnnnnnnnnnnnnnnnnnnnnnnnnnnnnnnnnnnnnnnnnnnnnnnnnnnnnnnnnnnnnnnnnnnnnnnnnnnnnnnnnnnnnnnnnnnnnnnnnnnnnnnnnnnnnnnnnnnnnnnnnnnnnnnnnnnnnnnnnnnnnnnnnnnnnnnnnnnnnnnnnnnnnnnnnnnnnnnnnnnnnnnnnnnnnnnnnnnnnnnnnnnnnnnnnnnnnnnnnnnnnnnnnnnnnnnnnnnnnnnnnnnnnnnnnnnnnnnnnnnnnnnnnnnnnnnnnnnnnnnnnnnnnnnnnnnnnnnnnnnnnnnnnnnnnnnnnnnnnnnnnnnnnnnnnnnnnnnnnnnnnnnnnnnnnnnnnnnnnnnnnnnnnnnnnnnnnnnnnnnnnnnnnnnnnnnnnnnnnnnnnnnnnnnnnnnnnnnnnnnnnnnnnnnnnnnnnnnnnnnnnnnnnnnnnnnnnnnnnnnnnnnnnnnnnnnnnnnnnnnnnnnnnnnnnnnnnnnnnnnnnnnnnnnnnnnnnnnnnnnnnnnnnnnnnnnnnnnnnnnnnnnnnnnnnnnnnnnnnnnnnnnnnnnnnnnnnnnnnnnnnnnnnnnnnnnnnnnnnnnnnnnnnnnnnnnnnnnnnnnnnnnnnnnnnnnnnnnnnnnnnnnnnnnnnnnnnnnnnnnccatgaaattctggatgaccatgcgattgtaatcgccaatggcctgattgaacgtgtttgcccgctggcggaactgccgccggagatcgaacagcgttccctcaatggagcagtaatctcccccggtttcatcgacgtacagcttaacggctgcggcggtgtccagtttaacgataccgcagaggcggtatcggttgaaacgctggaaatcatgcaaaaagccaacgagaaatcgggctgcaccagctatctgccaacgctgatcaccagcagcgatgacctgatgaaacagggtatccgcgtcatgcgcgaatacctggcaaaacatccgaatcaggcgctgggcctgcacctggaaggaccatggctgaatatggtcaagaaaggcacccataacccaaactacgtgcgcaaaccggatgccgagctggtggattacatgtgcgccaatgccgatgtgatcaccaaagtaacgctggccccggaaatgaccggcacggacgttatcagcaaactggccgccgccgggattgtggtgtctgcgggccattcgaacgcgacgctgaaagaggcgaaggccggtttccgcgcaggcattacgtttgccacacacctttataacgcgatgccctatattactggccgcgaaccgggactggttggcgccattctggatgaaccagacgtctactgcggcattatcgccgacggcttgcatgtcgattacaccaacatccgcaacgccaaacgcctgaaaggcgacaagctctgccttgtgacggatgctaccgctccggcaggggcgaatattgaccagttcatttttgctggtaaaacaatatactaccggaatggactgtgtgtggatgagaacggcacgctgagcggttcttctctgacgatgatcgaaggggtacgtaacctcgttgaacattgcggcatcgcgcttgaggaagtgctgcgcatggccacgctttatccggcgcgcgccattggcgtcgataaacagctcggcggtattgcgccaggtatggttgcaaacctgacggcgttcacacacgattataaaattattaagaccatcgttaatggtaacgaggtcgtcactgagtaagtaaaagtatgacaccaggcggacaagctcaaatcggtaatgtcgatctcgttaaacaacttaacagcgcggcggtttatcgcctgattgaccagcacgggccaatctcacgcattcagatagccgaacaaagccagcttgctcccgccagcgtgacaaaaattacacgtcagctcattgagcgcggcctgatcaaagaagtcgatcagcaggcctccaccgggggccgccgcgcgatttccatcgtcacggaaacccgcaattttcaggccattggcgttcgcttaggacgtcatgacaccacgcttacgctctacgatctgagcagcaaggccattgccgaagaacactacccccttcctgagcgcacgcaggagacgcttgaacacgcgttgctgaataccattgcgcatttcatcgaaagctgtcagcgcaagatccgtgaactcatcgccatctcggtgattttgcccggcctggttgacccggaaagcggcgttattcgctacatgccgcatattaaggtagagaactgggggctggttgaggcgctggaaaagcgcttcaagctgacctgctttgttggtcacgatattcgctcgctggcgctggcggagcactactttggtgcgagccaggactgcgaagactctattctggtgcgcgttcaccgtggtacaggtgcgggcatcatctcgaatggccgcatttttattggccgtaacggtaacgtaggcgagattggtcatatccaggtggaaccgcttggcgagcgctgccactgcggtaactttggctgtcttgaaaccgttgccgccaatgccgccattgaacatcgcgttcgccatctgctggagcagggttaccagagccgcgtcacgctggacgattgtaagatcggcgccatctgcaaagcggcaaacaaaggcgatgcgctggcctgcgaagtgatcgaacaggtaggacgccacctgggtaagaccatcgccattgccatcaacctgtttaatccgcagaaagtggtgattgccggcgagatcgttgaagccgaaaaagtgttactgcccgccattgaaggctgcatcaatacccaggcgctgaaggcatttcgccagaatttgccggtggtgcgatctacgctcgatcaccgctcggcaattggcgcattcgccctggtaaaacgtgccatgctcaacgggatcctgctgcaacatttgctggaatcctgatcggaccttatagtaacgccttctttttttgatgtcggattgtccatgaccattaagaatgtaatttgtgatatcgacggcgtgctgatgcacgacaacgttgccgtgccgggtgctgcggagtttcttcaccgcatcatcgacaaaggaatgccactggttcttctcacgaactacccttcacagactggtcaggatctggcaaaccgctttgctaccgcaggcgtcaacgtcccggacagcgtgttctatacctctgcgatggcgaccgcggatttcctgaagcgtcaggaaggcaaaaaagcctatgtcgttggtgaaggtgcgctgatccacgagctgtataaagcgggcttcaccatcaccgacgtgaacccggactttgtcatcgtgggcgaaacgcgctcctttaactgggagatgatgcataaggcagcctactttgtcgccaacggtgcgcgttttatcgccaccaacccggacacgcacggtcgtggtttttatcccgcctgcggtgcgctttgcgccggtatcgaaaaaatctcgggtcgtaagccgtttgttgtcggtaaaccgagcccgtggatcatccgcgccgcactgaatacgatgcaggcacactcagaagaaaccgtcattgtgggcgacaacctgcgtaccgatattctggctggcttccaggcggggcttgaaaccatcctggtgctttctggcgtttcacagcttgatgacattgatacgatgccgttccggccaagctggatttacccttctgtcgacgaaatcgacgttatttgattcagaaccacgcctaagggcgtggtttttcatttctgccgtctgaaaacatcacttcatctaacgaaatcagcccttcattgagaaatcatcaatagaattgcttaagacatactctttttttaagattcggcaatcgccattgcactttttacgttttcatcggtaaaacgcttgcgccccctcccccttttacggcattttcataagcaagcaacatcacaacgcaacagggttaacggagaaggttatgtgttctatttttggcgtactggatattaaaactgacgcgggcgaactgcgtaaaaaagcactcgaattgtcccgcctgatgcgccatcgcggtccggactggtcaggcgtatacgccagcgataaagcgattctggctcatgaacgtctctccattgttgatgtcaacgctggcgcacagccgctgtataacgagaaaaaaacgcacgcgctggctgttaacggtgaaatttacaaccatcaggcgctgcgcgccgagtacggcgatcgctacgcgtttcagaccggctcagactgcgaagtgatcctggcgctgtatcaggagaaaggcccggagttcctcgacgatctgcaaggtatgttcgccttcgcgctgtacgacagcgaaaaagacgcttacctgattggccgcgaccatatcggtattatcccgctgtacatgggacacgatgagcacggcaacttctacgttgcctcagagatgaaagccctggtgccggtgtgccgcaccatcaaagagttcccggcaggtagctacctgtggagtaaagacggcgagatccgcccgtactaccagcgcgactggtttgattatgaggcggtgaaagacaacgtgacggacaaagccgaactgcgtcaggccctggaagagtcagtgaaaagccacctgatgtcagacgtaccttacggcgtactgctctccggcggtctggactcctccgtgatctccgcgatcaccaagaaattcgccgcacgtcgcgtggaagatcaggagcgctctgaagcctggtggccgcagctgcactcctttgccgtgggtctggaaggggcacctgacctgaaagccgcccaggaagtggcaaatcatctcggcacggtgcaccatgaaattcacttcaccgtacaggaaggtctggatgcgatccgcgatgtgatctatcacattgaaacctatgatgtgaccaccattcgcgcctccacaccgatgtatttgatgtcgcggaagatcaaagcgatgggcatcaagatggtgctctccggcgagggttctgacgaagtgtttggcggttacctctatttccacaaagcgccaaacgccaaagagctgcatgaagaaacggtgcgtaagctacaggcgctgcacatgtttgactgcgcgcgcgccaacaaagcgatgtccgcctggggtgtggaagcccgcgtgccgttcctcgataagaaattccttgatgtggcgatgcgcatcaacccgcaggacaaaatgtgcggcaacggcaaaatggagaaacatatcctgcgagaatgttttgaatcctacctgccggcgagcgtggcgtggcgtcagaaagagcagttctcggatggcgtgggttacagctggatcgacaccctgaaagaggtggcggcgaaacaggtttctgatcaacaactggaaactgcgagcttccgtttcccgtacaacacgccagcctcgaaagaagcgtatttgtaccgtgagatctttgaggagctgttcccggttccaagcgcagcagagtgcgtaccgggtggcccatcggtcgcctgctcttctgctaaagccattgaatgggatgaatcattcaaagcgatgaacgatccgtcaggacgcgcggtgggcgttcaccagtctgcctataaataatgttcagagtatcatcaggccctccggggcctgatttttttgcctctcttttctccgcataaaatcgattaataaccaataattgtcgaatattcggcctcgctgttcgcaacctaaccaaacagtcacattccggctattttcattgaaaaaggtgttgacgctgcaagggtctatacgcataatgcgccccgcaacgccgataaggtaacgcgaaaaaaagatggctacgtagctcagttggttagagcacatcactcataatgatggggtcacaggttcgaatcccgtcgtagccaccatcttttttgcgggagtggcgaaattggtagacgcaccagatttaggttctggcgccgcaaggtgtgcgagttcaagtctcgcctcccgcaccattcccaggtaagcgttgcacggatggggtatcgccaagcggtaaggcaccggtttttgataccggcattccctggttcgaatccaggtaccccagccatatttcttcgattatgcggttctccgcggtattggggtatcgccaagcggtaaggcaccggtttttgataccggcattccctggttcgaatccaggtaccccagccatcgaagattgcagtactggctacgtagctcagttggttagagcacatcactcataatgatggggtcacaggttcgaatcccgtcgtagccaccatatttatgttatcgaatacgattcggtaaactgaacattgttggggtatcgccaagcggtaaggcaccggattctgattccggcattccgaggttcgaatcctcgtaccccagccactttaaagtcgttaagcagtttgtttaacgcaattggggtgtcgccaagcggtaaggctctggtttctgataccagcattccggggttcgaatccctgcaccccagccacttaaaacaaacaagcccgctctgcgggcttttttgtttttgttgctcagaatagtgcggcctgatgccctcaccctaaccctctcccacggggagagggaataaagatcagagtccgagggcatatttcagggcctgacgcttcagaccaccggcacgctccgccgccatcaatccaatattgcgcactatacgcaccggaccaacatcattgctgaacccggcatagaacagatccatccccgactgcataatgaagttatccgccatacggcgcgtctggtagcgcttcagtacctgatggctggcccaggcttccgcgtgggcgcgagcgttacccagcacatccagtaacgcatcgacgtcacggtatcccagattcaccccctgccccgccagcggatgaatggtgtgcgccgcgtcccccaccagcaccagtccttcacgggcatactgtaacgcatggcgtcgcatcagcgggaatgcgccggcggcaaccggggtcacgttacccagacgactcgggaagtgctggcgaatttcgcgctgcaactgatccatggacagcccctgcaactgtcgaatgcgcgccggtttgtcgtaccacaccagcgaggcccagttatcaaacagcggtaagaatgcatgcgggccgttcggcgtaaaatgctgccaggtgctttcgcccggcgcgttttctgactgaacggtgatcagcatgcaggactgctggtactgccaggcatggatcccaatgcctgccatctgcctgacctgcgagttcgcgccatccgcccccaccaccagcttcacggccagctcatcgtcgttgtccagcgtcaggagatacccgccatcatgacgatgcagggctttcagcgagtccggaacgcgcagcgtcaccttcgggtgcgcctccagcgcctgccagagtgcctgctggagcacgttgttttccaccatatagcccaggcgcggcagtttcagctcggcggcatcaaacgacacgtgagcattttcccactcccaggtttcaagacggctgtatgggtgcgcgcgcatcgccagcaccgcctcccagacgcccagcccgcgaagcagatcaacagaggccgcgctgatggcggaaatacgcacgtccggttggctggcaggatcgaatgccggcggagccgcctgttcaataacggttacgtcaaatccctgctgcgccagccccagcgccagtgcgccgccgaccataccgccgccaacaacggcaacttcggtgttcaggagtgtcatggtcactattccttattgaagaataccttaagtttaccggatttttgcggccctgaggttgacaaccttcatactggtcacaaccgcaccaaagcattacaatacgcggcttgcaatcctgagctgagcaagtcgatgactaaaaaactccatataaaaacctggggctgtcagatgaacgaatacgattcatcgaagatggccgatctgctggataccacccacggataccagctgactgaaaatgcgaaagaagccgatgtgctgctgctgaacacctgttcaattcgtgaaaaagcacaggaaaaagtttttcatgtgttaggccgctggaagcttctcaaacggaaaaatccggacctgattattggcgtgggtggctgcgtcgcatcgcaggaaggtaagctgatccgccagagagccccctatgtggatatcgtttttggccctcagaccctgcaccgcctgccagagatgattaatcaggttcgcggcagccgtagcccggtggttgacgtgagcttcccggagatcgagaaatttgaccgtctgccagagccgcgcgctgatggcccgaccgccttcgtctccatcatggaaggctgcaacaaatactgtacttactgcgtggtgccttacacccgcggtgaagaagtgagccgcccggcagacgatatcctgtttgaaatcgcgcagcttgccgcgcagggcgttcgtgaagtgaacctgctgggtcagaacgtgaacgcctggcgcggggaaaactacgacggtaccaccggcagctttgctgaactgctacgtctggtggcggcgattgacggcatcgaccgcattcgctttaccaccagccatccgatggaatttaccgacgacattattgacgtctatcgcgatacgccagagctggtgagcttcctgcacctgccgatccagtgcggttctgatcgcgtgctgaacctgatgggtcgtccacatacggtgctcgagtataagtccaccatccgcaagctgcgtgaagcgcgcccggatatccagattagctccgactttatcgtcggcttccctggcgaaaccgctgatgactttgagcgcaccatgaagctcatcggcgaggtgaatttcgacgtcagctacagctttatcttctctgcgcgcccgggcacccctgcggccgatatggttgacgatgtgccggaagaagagaaaaagcagcgtctgtatattctacaggagcgtatcaaccagcaggccaacgcctggagtcgtcgtatgctcggtactgtccagcgtattctggtggaaggcacctcccgtaagagcgtcatggaactgtctggtcgaaccgaaaataaccgcgtggtgaattttgaaggcaccccggacatgatcggtaagtttgtggacgtcgagattgtcgaagtactcacgaactcgctgcgcgggaaggtggtacgcactgaggacgaaatgggtctgcgaattgcacagactccggaatccgttatctctcgcacccgcaaagtcaacgactctggcgtgggtatttaccagccttgatccttctggcctgcctgtccggcaggccttgtatttcctctcatcacccccaatatctaccgcaacgcttgcgcctttattgtgtggcgtgaataatttcggtaatgaccgttttattacgccgtgtggcggcgagtcagttaactactcaaagaggaacagtttgaacatagatacgcgtgaaattagccttgagccagcagacaacgctcgcctgctgagcctgtgcgggccgtttgatgacaacatcaaacaacttgagcgacgtctgggtatcgaaatcaatcgtcgcgataaccatttcaaactcaccggacgcccaatctgcgtcaacgccgcggcggatattctccgcagcctgtatgttgataccgccccgatgcgcggtgagatccaggatattgaacctgaacagatccacctggccattaaagaggcgcgcgtgcttgagcagagcgcggagagcgtgccggactatggcaaagccatcaacatcaaaactaaacgcggcgtgattaagcctcgtaccccgaaccaggcgcagtacatcgccaacattctcgaccacgacatcaccttcggtgtaggcccggcgggtacgggtaaaacctatctggcggttgccgctnnnnnnnnnnnnnnnnnnnnnnnnnnnnnnnnnnnnnnnnnnnnnnnnnnnnnnnnnnnnnnnnnnnnnnnnnnnnnnnnnnnnnnnnnnnnnnnnnnnnnnnnnnnnnnnnnnnnnnnnnnnnnnnnnnnnnnnnnnnnnnnnnnnnnnnnnnnnnnnnnnnnnnnnnnnnnnnnnnnnnnnnnnnnnnnnnnnnnnnnnnnnnnnnnnnnnnnnnnnnnnnnnnnnnnnnnnnnnnnnnnnnnnnnnnnnnnnnnnnnnnnnnnnnnnnnnnnnnnnnnnnnnnnnnnnnnnnnnnnnnnnnnnnnnnnnnnnnnnnnnnnnnnnnnnnnnnnnnnnnnnnnnnnnnnnnnnnnnnnnctgctgttgaagccggtgaaaaactgggcttcttgccgggtgatttgagtcagaaagtagatccctacctgcgtccgctgtatgacgcgctgttcgaaatgctcggcttcgagaaagttgaaaagctcatcgagcgtaacgtgattgaagttgctccgctggcctacatgcgtggccgtacgcttaacgacgcgttcatcattctggatgagagccagaacaccaccatcgaacagatgaagatgttcctgacgcgtattggctttaactcgaaagcggttatcaccggtgacgtcacccagattgacctgccgcgtaacaccaaatcgggtctgcgtcacgccatcgaagtcctggccgaggtagaggaaatcagctttaacttcttccacagtgaagacgtggtacgccatccggtcgtcgcgcgtatcgttaacgcttatgaggcctgggaagaggcagatcagaagcgcagggccgaactggccgcagaacgtaagcgcgaagcgcaggagcatgaacagaaatgagtcaggtgatcctcgatttacagctggcctgtgaagataattccggcatgccagaagaggcacagtttcagaaatggctggatgccgttatcccccagtttcaggaagaatcagaggtcacgattcgcctggtggatgaagcagaaagccatgagctcaacctgacctaccgcgggaaagataagccgaccaacgtgctctctttcccgttcgaggcccctccgggcattgagatgccgctgctgggcgatctgatcatctgccgtcaggtggttgagcaggaagccaaagagcagcaaaagccgctggaagcgcactgggcacacatggtggtgcacggtagcctgcatcttctgggttacgaccatattgaagatgacgaagcggaagagatggaatccctcgagacggagataatgcttgctctgggctatgaggatccgtacattgccgagaaagaatagtcagtcactgactaccatgccgccgcgcagggacatagcgcggcggttaacgttgaactaacaagagaacccttaacaaacgccatgagcgacgacaattcacacagtagcgacacgacaaccactaaaaagggatttttctccctcatcctgaaccagcttttccacggcgaaccgaaaaaccgtgatgaactgctggagctgattcgtgattccgggcagaacgaccttatcgacgaagatacgcgcgaaatgctcgaaggggtgatggacatcgccgaccagcgcgtccgcgacatcatgatcccccgctcgcagatgattaccctgaaacgcaaccagacgctggacgagtgcctcgatgtgattatcgaatcggctcactcacgtttcccggtcatcagcgaagacaaagatcacattgaagggattttgatggcgaaagatctgctgccgtttatgcgcagcgatgccgaagccttcagtatggaaaaggtgttacgcccggccgtggttgtgccggaaagtaaacgtgtggatcggatgctgaaggagtttcgctcccagcgctatcacatggcgattgttattgatgaatttggtggcgtttccggtctggtcacaatcgaagacatccttgagctgatcgtgggcgaaatcgaagatgagtatgacgaagaagaggatatcgacttccgtcagctgagccgccacacctggaccgtgcgcgcgctggcctccattgaagacttcaacgatacctttggcaccagcttcagcgatgaagaagtggacaccattggtggcctggtgatgcaggccttcggccatcttcctgcccgcggtgaaaccgttgacatcgatggttaccagttcaaggtcgcaatggctgacagccgacgtattattcaggttcacgtcagaatgccggacgactcaccggtgccaaaactggaagattaatgtaaatggcatttgccccactctttgaacgccagcgcgtccgtttgctgctggcgctgttactcggagccagcggtacgctggctttttctccttacgatatctggccggccgctattctctccctgatggggctacagggtcttaccctgaaccgtcgtccggtacaggccgcggccattggctacttctgggggctggggctgttcggctctggtatcaactgggtctacgtcagtatcgcgcaatttggcggaatgccggggccggttaacgtcttcctggttgtgctgctcgccgcctatctctcgctctacaccggcctgttcgcgggcatcctgtctcgcttgtggccaaaaacgacctggctgcgcgcggcgatagcggcacccgttgtctggcaaatcaccgaatttctgcgcggctgggtactgaccggcttcccgtggttgcagttcggctatagccaggtagacggcccgctgaaaggcctggccccggtcatgggcgtggaagccatcaatttcctgttgatgatcgtcagcggcctgctggtgctggccctggtgactcgtaactggaagccgctggttgccgcgttgatcctgtttggcctgcccttcccgctgcgttatatccagtggtttacgctggagcccgcgcgcgccacgcaggtttcactggtacagggcgatatcccgcagtccctgaaatgggatgagaatcagctgctgaacacgctgaaaatctacgccaacgccactgaaaaggtgatgggcaaatcgcagctcatcatctggcctgagtctgcgatcccggacctggagatcaatcagcagcccttcctgaagatgatggacgatctgctgcgcgcgcgcggcagtacgctgatcaccggaattgtggatgcgcgtctcaatcagcagaaccgctatgacacgtacaacacgatcattacgctcggtaaggacagcgaatacagctatacctccaccaatcgctacaacaaaaaccaccttgtaccgtttggcgaatttgttccgctggagtctattttgcgcccactggcaccgttctttgatttgccgatgtcctcattcagccggggcccttacgttcagccgcagctgcatgcgcacggttttgccctgacggccgccatttgctacgagattatcctcggcgagcaggtgcgcgataatttccgcccggacaccgactatctgctgaccatctcaaacgatgcgtggttcggtaaatcgattggcccgtggcagcacttccagatggcgcgaatgcgttctctggagctggcacgtccgttgctgcgcagcaccaataacggcattaccgccgtgattggtccgcaaggtgaaatccaggccatgatcccgcagtttacccgtgaggtgctgactactaacgtcacgccaactaccgggcttacgccttacgcgcgcaccgggaactggccgctgtggattttgaccttgctcttcggctttggcgcagtactgatgagcctgcgtcagcgtcgtaaataaccttaccttctgttgccgggtggcggctacgccttacccggcctactctccgccgcccccacccgacaatttcctcccaaacttcaattctggcacgcctgttgctttgtttattcatatcaacgctgtctggcttaacgtgcaactttgtcgcaccagcgtagatcatcggtagcaccgaaacggtgcaacgagggattattgcctctgaatggtgcggcgcgcttcgcaaaaataaacaataacgcagcaaaatctttacattaagccagactaaatgttaacaagcttgcataacactgcactcgcattgcgcgagatataacaacatcacaatgggtatctatgcgtcactggcgctgataagaaaggagttgggtatgcaattacgtaaactggccacagcaatgctggttatgggaatgtctgcgggggttgtccacgctgaagacgctccggcagcaggaagcactctcgacaagattgccaaaaacggcgtgatcgtggtcggccaccgtgaatcttctgtcccgttctcttactacgacaacacgcaaaaagtcgtaggctattcacaggattactccaacgccatcgttgaagccgtgaagaaaaagctgaacaaacctgacctgcaagtgaagctgatccccatcacttcacaaaaccgtattcctctgctgcaaaacggcacatttgattttgaatgtggctcaaccaccaacaaccttgagcgtcagaaacaggccgctttctcggacaccatcttcgttgtgggcacccgcctgctgacgaagaaaggcggcgacatcaaagattttgctgacctgaaaggcaaagcggttgtcgtgacctccggtaccacgtccgaagtgctgctgcacaagctgaacgacgagaagaaaatggacatgcgcatcatcagcgcgaaagaccatggcgactccttccgtaccctggaaagcggccgtgctgtcgcgtttatgatggatgacgccctgctggcgggcgaacgcgcgaaagcgaagaaaccagacaactgggaaatcgtcggtaccgcccagtcgaaagaagcctacggctgtatgctgcgtaaaggtgacgaggacttcaagaaactgatcgatgacaccatcgctcaggcgcaaacctccggcgaagcggcaaaatggttcgacaaatggttcaagaacccaattccaccaaaaaaccttaacatgaactttgaactgtctgacgacatgaaagcgctgttcaaatcaccaaacgacaaagctcttaactaattagaacgacaggggcgggatctcctgccctctcgattgtcgggaagcatggacagactatacgttgagtggtcgttccccactcagcgcaaaaattgagcttctcaccaatcttcgagggtagcgctgctacccttttttttctggagtttactatgtcaattgactggaactggggcatctttctgcaacaagccccgttcggcaacaccacctatctcggctggctgtggagcggctttcaggttaccgttgcgttatcgataacggcgtggattatcgcgtttcttgtcggttcgctgttcggtattctgcgtaccgtccctaaccgttttctctcttcgattggcacgctctatgtggaactgttccgtaacgttccgctaatcgtgcagttctttacctggtatctggtgatcccggaactgctgccggaagatctcggcatgtggtttaaggccgagctggatcctaacgtacaattttttgtctcctccatgctgtgtctggggctgttcaccgctgcgcgcgtctgcgagcaggtacgtgccgccatacagtcactgccgcgcgggcaaaagaatgcggcactggcaatgggcctgactctgccccaggcctaccgttacgtactgctgcctaacgcttaccgcgtcatcgttccgccgatgacgtccgagatgatgaacctggtaaaaaactcggctatcgcctcaaccatcggtctggtggatatggcggcacaggcgggcaaactgctggattactccgctcacgcctgggaatccttcacggcgatcacgctcgcctatgttctgattaacgctttcatcatgctggtgatgaacctggttgaacgcaaagtacgcctgccgggcaatctggggggcaaataaatgtacgattttgactggagttccattgttccctccatgccctatctgctggatggactggcaatcaccttaaagatcaccgttatcgccattatcgtcggtattatctggggcaccctgctggcagtgatgcgcctgtcgagctttaagccgctcgcctggtttgccacggcctacgttaacgtattccgctccattccactggtcatggtgctgctgtggttttatctgattgttcccggctttttacagaacgtactgggactgtcgccaaagaccgatatccgcctgatctctgccatggttgcgttttccatgtttgaagccgcctactactcagagatcatccgcgcaggtattcagagtatctcacgcgggcagtccagcgctgcgctggcgctcggtatgacgcactggcagtccatgaagctcattattctgccgcaggcgtttcgcgccatggttccgctgctgctgactcagggcatcgtcctgttccaggatacctccctggtctacgtgctaagtctggcagacttcttccgtaccgcctccaccattggcgaacgtgacggaacgcaggttgagatgatcctcttcgcgggcggggtctattttgtgattagtttaagcgcatcgctgttggtcagctggctgaagaaaaggacggtataatgatttccctgaaaaatgtttctaaatggtatgggcactttcaggtgctgaccgactgctcaacagaagtgaaaaaaggcgatgtggtggtggtatgcggcccgtccggttccggtaagtcgacgcttatcaaaaccgttaatgggctggaacctgtccagcagggcgagattgtcgttaacggcaccaaagtgaatgaccgcaaaaccaaccttgcccagcttcgctcccacgtagggatggtgttccagcattttgagctgttccctcacctgtccatcattgagaacctgacgctggcgcaggtcaaagtgctgaaacgcgacaaaaaagcggcgcgcgaaaaggggctgaagctgctggaacgcgtcgggctgtctgcgcatgcggataagttcccggcccagctttcgggcggccaacagcagcgtgtggcaatcgcgcgtgcgctgtgcatggatccggtggcgatgctgtttgatgagccgacgtcggcgctcgatcctgagatgatcaacgaagtgctggacgtcatggtggagctggcgcacgaagggatgaccatgatggtggtgacgcacgaaatgggcttcgcccgtaaagtggccaaccgcgtaatcttcatggatgaagggaaaattgttgaagactcaccgaaagaagagttcttcgccaatcctaaatctgaacgtgcaaaagacttcctcgccaaaatcctgcattaatccttttagtgcgcaatctgcggattgcgcactgcttcacgctttagatctctttttctattcggcgtcacatcgcagcgttaaccttgtcacaaataatgctgagaatggagaacgctatggcacagccaattattctcgactgcgatccgggtcatgatgacgcgatcgcactcgtccttgctcttgcttcccctgaactggacgtaaaagctgtcacctcctccgccgggaaccagacgccggataaaaccttactaaacgtgttgcggatgttgacgctgctgaaacgcaccgatattccggtcgcaggtggcgccgttaagccactgatgcgcgagctgatcattgcggataatgttcacggtgagagtgggctggatggcccggcgctaccggagccgaatttcgcaccgcaaaactgcactgccgtcgagctcatggcgaaggtgctgcgtgagagcgcagagcccgtgacgctggtggcgaccggcccgcagaccaacgtagcgctgctgctgannnnnnnnnnnnnnnnnnnnnnnnnnnnnnnnnnnnnnnnnnnnnnnnnnnnnnnnnnnnnnnnnnnnnnnnnnnnnnnnnnnnnnnnnnnnnnnnnnnnnnnnnnnnnnnnnnnnnnnnnnnnnnnnnnnnnnnnnnnnnnnnnnnnnnnnnnnnnnnnnnnnnnnnnnnnnnnnnnnnnnnnnnnnnnnnnnnnnnnnnnnnnnnnnnnnnnnnnnnnnnnnnnnnnnnnnnnnnnnnnnnnnnnnnnnnnnnnnnnnnnnnnnnnnnnnnnnnnnnnnnnnnnnnnnnnnnnnnnnnnnnnnnnnnnnnnnnnnnnnnnnnnnnnnnnnnnnnnnnnnnnnnnnnnnnnnnnnnnnnnnnnnaacatcgcccgtatcgtcatcatgggcggggcaatggggctggggaactggacgccagcagcagagttcaacatcttcgttgacccggaagccgcggaaatcgtcttccagtcgggcctgccgattgtgatggcggggctggacgtgacgcatcgggcacagattatgacagacgatattgaacgcttccgcgccgtgggcaacccggttgcaacgaccgtggccgagctgctcgacttctttatggagtatcacaaagccgagaagtggggcttccacggcgccccgctgcatgacccatgcaccatcgcctggctgctgaagccggaaatgtttaccacggtcgagcgttgggttggtgtggaaacacaggggaaatatacccagggaatgacggtggtggactattactcgctgacgggaaacaagccgaataccacggtaatggtggatatcgatcgggaagcgtttgtggatttgctggcggagcggctggcttattattctgcggcctgatgccctcaccccgcccctctcccacagggagagggtgcaaacagttttgcttttacctacggctcaaatggccgacgctggaactggtcgtgcccgcacttcggacacagcgacaacacctccggcgtataaacggcgatatgatggtggcacttctcacacaccaggttccccaaccccactacttcgccgctgtgatagacaccgtggtggtttaaatcctgaaacacctcacgccattccagctgagttttatcggtaatatccgccagctcctgccacaggctctctttgatgacccgcataaaaacgctgtcggcgatctcgtcctggctctcttcatagcttcgcgcgaactcctccaggtcacggcgcacggcgcgcgtcacctcttccacttcggttcgcgttaactcacccgtttgcgtcacgcgtgcgcgtgcctgttcgaccagcgcgtcgatatcacgctcgccgttacgcagccgttccgtcagagtcgctaccagttcacggtaaaattgagcaaccttgttcatcattttgcctcccgggtaagtaactgtctctaataatagaccttatttcgccgccgctttgtcaggtgaagcacagacccggtaaattcctgcaaagtgcatttgcgtgaaaggctgttttgacgcgggcgtttgggctatgctatgcggatctgaattaccacatccattggctacatttgtagctgtattgaacacaggaccactggctgccatgcaagagcaataccgcccggaagagatagaatcaaaagtccagcaacactgggacgagaagcgcacctttgaagtaaccgaagacgagagcaaagagaagtattactgcctgtcgatgcttccctatccttctggtcgactacacatgggccacgtgcgtaactacaccatcggtgacgtgattgcgcgctaccagcgtatgctgggcaaaaacgttcttcagcctatcggctgggatgcgttcggcctgcctgctgaaggcgcggcggtgaaaaacaacacggcaccggctccgtggacgtacgacaacattgcgtacatgaaaaaccagctgaaaatgctgggctttggctatgactggagtcgcgagctggcaacctgtaccccggaatactaccgctgggagcagaaattctttaccgagctgtataaaaaaggcctggtgtacaagaagacctctgccgttaactggtgcccgaatgaccagaccgttctcgcgaacgaacaggttatcgatggctgctgctggcgctgcgacaccaaagtagagcgtaaagagatcccgcagtggtttatcaaaatcaccgcctacgctgacgaactgctgaacgatctggataatctggaccactggccagataccgttaagaccatgcagcgcaactggatcggccgttccgaaggtgtggaaattaccttcaacgttgagaactacgaccagaccctgaccgtctataccacccgtccggacaccttcatgggcgcgacctacctggccgtggccgcaggtcacccgctggcgcagaaagcggcagaaaacaatccggaactggcgaccttcatcgacgaatgccgcaatactaaagtggccgaagccgacatggcgacgatggagaaaaaaggcgttgataccggctttaaagccattcacccgctgacgggcgaagcgatccctgtctgggccgccaacttcgtactgatggaatacggcacaggcgcagtgatggccgtgccgggtcacgaccagcgcgactacgaatttgccaccaaatacggcctgaccatcaagcctgttattcttgctgctgacggctctgagcccgatctctctgagcaagcgctgactgaaaaaggcaccctgtttaactccggtgagttcagcggcctgagcttcgaagaaggcttcaacgccatcgccgacaagctggcctccctgggcgtgggcgagcgtaaagtgaactaccgtctgcgcgactggggcgtttcccgtcagcgttactggggtgcgccaatcccaatggtgactctggaagatggcaccgtgatgccaacgccggaagatcagctgccggtgatcctgccggaagacgtggtcatggacggcatcaccagcccgatcaaagccgatcctgagtgggcgaaaaccaccgtcaacggtcagccagcgctgcgtgaaaccgacaccttcgacacctttatggaatcctcctggtactatgcgcgctacacctgcccgcagtacaaagaaggcatgctggattccgatgcagcaaactactggctgccggtagacatctacatcggtggcattgaacacgccatcatgcacctgctctatttccgcttcttccataaactgatgcgtgacgcaggcctggtcaactccgacgagccggcaaaacagctgctgtgtcagggtatggtgctggcagatgcgttctactacgttggcgcgaacggcgagcgtaactgggtttctccggttgatgcgattgtggagcgcgacgagaaaggccgtatcgtgaaggcgaaagacgccgaaggtcatgaactggtgtataccggcatgagcaagatgtccaagtcgaaaaataacggtatcgacccgcaggtaatggttgagcgttacggcgctgacaccgtgcgtctgttcatgatgttcgcctccccggcagatatgacgctggaatggcaggaatccggcgttgaaggggcaaaccgcttcctgaaacgcgtctggaaactggtgtacgagcacacctctcagggtgatgcgccagcgctgaacgtggctgcactgagcgaagatcagcaggcgctgcgtcgtgatgttcataaaaccattgcgaaagtcaccgatgatattggtcgtcgtcagaccttcaataccgcaattgcggctattatggaactgatgaacaagctggcgaaagccccgcaggacggcgagcaggatcgcgccttaatgcgtgaagcgctgctggcggtcgttcgcatgcttaacccgttcacgccgcacgttagcttcaccctgtggcaggagctgaaaggcgaaggcgatatcgacaacgcgccgtggccagtggcggatgaatccgctatggtggaaaacaccacgctggtggtggtgcaggttaacggtaaagtgcgcggtaaaattaccgtcgcggtcgacgcaaccgaagaacaggttcgcgagcgcgcaggccaggagcatctggtcgcgaaataccttgagggcgttaccgtacgtaaagtgatctacgtacctggtaaactgctgaatctggtcgttggctaagcgcgggaggaaacgtgcgacaactggcaacaatactcttatctctggcggtgctggtcaccgctggctgcggctggcacctgcgcaacaccacggcagtgcctgctcagatgaaaacaatgatcttcgactcatccgatccgaacggaccgctgagccgggccattcgtaaccagctgcgtttgaacgatgttgagctgatcgagaagggaaccctgcgtcaggatgttccttcgcttcgcgtcctgaaatcaacgctgtcacaagatacggcctcgatcttccaggatgggcgaacggcggaatatcagatggtgcttaccgttgatgcggccgtcttgatgccaggtaaagatatttaccctatcaataccaaagtctaccgctcgttcttcgataacccgcagacggcgctggcaaaagacgccgaacagcagattatcatcaaagagatgtacgataaggccgcggaacagctgatccgcagactgcctgccattgccgcgtcgacgaaaaaaggcgctgacgtcatcgaaacaccggatgccagcacgccggatatgccaacgtctctgggtaactgatgatcaggttgtatcctgaacaactccgcgcgcagctcaacgaagggctgcgcgcggcctatctgctactcggcaatgaccccctgttacttcaggaaagccttgatgcggttcgccatgcggcagccgcgcagggtttcgatgagcatcatacgttccagatcgataacagtaccgactggaacgctatcttctcgctttgtcaggccatgagcctgtttgcctctcgtcagacaatccagatcctgctgccagagaatggacctaacgctgctatcaatgaacagctggccatgctggtaagtttgttacacgacgatctgctgcttatcgtacgcggcaacaaactcacaaaagcgcaggaaaacgcggcctggtttacccggctagcccccagtgcggtgctggtcacctgccagacgccagagcaggcgcatctgccaaaatgggttgccgcgcgagcaaagcagcacaatttgcagctggatgaggccgccagtcagctcctgtgctactgctacgaaggcaaccttctggcactggcgcaggcgctggacaggctcgccctgctgtggcccgatggtaagctgacgctgccgcgcgtggaacaggcggtgaatgatgccgcgcactttacccccttccactgggttgatgcgctgctgtcggcgaaaagtaagcgtgccctgcacatcctgcaacagctgcgcctggaagggagtgagccggtcatcctgctccgtacgctccagcgcgaattactgctgctgaacaaccttaaacgccagtcagcacacacgcccctgcgcgccttattcgacaaacatcgcgtctggcaaaaccgtcgggcgatgaccacggaggcgataaaccgcctgagccaggagcagttgcgtcaggcagtacaacttctgatgcgcgccgaactgacgttaaaacaggattacggccagtctgtctgggcggagctggagagcctctctttgctgctctgccataaggcgctggcagacgtatttatcgatgggtgatatgcattctttacaggcaatgtatggcgggaccttcgacccggtacactatgggcatcttaagccggtagaaatcctcgcgaatttgattgggttgcagcgggtaatcatcatgcccaacaatgttccgccgcaccgtcctcagccagaagcaaccagcgagcagcgtaaagcgatgctcgcactggctatcgccgataagcctctcttcacgctggatgagcgtgaactgcgcagagataccccttcctggacatcgcaaacgctgcgggagtggcgcgctgagcaagggcccatgaaaccgctggcgtttatcatcggccaggattccttgctcaactttcccagctggtaccagtacgaaaccattctggaaaacagtcatctgctggtctgccgccgtccgggctacccgctgaccatgcgcgacgcacagcatcagcagtggcttgacgcgcatctgacggacaatatagaagacctgcacagtctccccgccgggaaaatttatctcgctgaaacgccgtggtttgatatttccgcaaccctcatccgcgagcgtctccagcagggtttagactgtgacgatctcctcccctcgcccgtgctggcctatatccacgcacacggtctgtatcagaaaagtacagatgtctgagcatcgccggcgaaattgtccgttaatgattatcctgccttgacaggctaagccatactgatatcctccgctgccagactttcccgccgatcgctgctttacagaaattgttttacaaaaatggcgatgcaatatcaggcggagggtgggatgatacccgccttcaaaagccgggcggtgacatttgtcccgcgactggcgtcagttcaggtatactgactgaccacgaattcatagttgtacaatctcattcacccagggggaaaacttgcagggtaaagcactccaggattttgttatcgacaaaattgatgacctgaaaggtcaggacatcatcgctatcgacgttaagggtaaatccagcatcaccgactgcatgatcatctgcaccgggacctcaactcgtcacgttgtttcgattgctgaccatgttgttcaggaatcgcgcgcggcagggctgcttccgctgggcgttgaaggtgaagcgaccgctgactgggtggttgtcgatctcggcgatgtgattgtccacgtcatgcaggaagagagccgtcgcctgtatgagctggaaaaactctggggttaatgcgtgaagttgcaactggtcgccgtcggcaccaaaatgccggactgggtacaaaccggttttactgagtatctgcgtcgtttcccaaaagatatgccgttcgaactggtggagatcccagcaggaaagcgcggcaagaacgcagatatcaaacgtattctcgataaagagggagaactgatgctggctgccgcaggcaaaaaccgcatcgtgaccctcgatatcccgggcaaaccctgggatacgccgcagctggcgcacgaactggagcgctggaagcaggatggtcgggacgtcagtctgttgattggcggaccagaggggttatctcccgcctgcaaagcggcagcagaacaaagttggtcactctcggcgctgacgctgccccacccgcttgtacgggttctcgtggcagaaagtttgtatcgcgcatggagcatcactaccaaccacccttatcaccgcgagtaatgactgaccagggtaatttaagcagcggatgaaactacagaattcttttcgcgactatacggctgagtccgcgctgtttgtgcgccgggcgctggtcgcctttacggggattttgctgcttaccggcgtgctgatcgccaacctctataatctgcaaattgtccgctataccgattaccagacccgctcaaacgaaaaccgtatcaagctggtgcccatcgcgcccagccgcggcattatctacgatcgtaacggcacgccgctggcgcttaatcgcaccatctaccagatagagatgatgcccgagaaagtggataacgtgcaggataccctgaacgcgctgagaagcgttgtcgacctgactgatgacgatatcgctgcgttcaaaaaagagcgcgcacgttctcaccgcttcacctccattccggtaaaaaccaacctgacggaagtgcaggtcgcccgttttgccgttaaccagtaccgtttccccggtgtggaagtcaaaggctataaacgccgctactatccttacggctccgcgctgacgcacgtcattggttacgtctccaaaatcaacgataaagacgtcgaacgtcttgataaagacggcaagctggctaactacgccgcaacccatgatattggcaagctggggatcgaacgttattacgaagacgtgctgcacggtcagaccgggtatgaagaggttgaagttaacaaccgtggccgcgtgatccgtcagctgaaagaggttcccccgcaggcggggcatgacgtctatctgacgctcgacctgaagctacagcagtatatcgagacgctgctggcgggtagccgtgctgcggttattgtgaccgacccgcgtaccggcggcattctggcgatggtttcgatgccaagctacgatccgaacctgttcgtggatggcatctccagcaaggattactccggcctgctcaacgatccaaacacgccgctggtgaatcgcgcgacgcagggggtttatcctccagcttcaacggttaaaccgtatgttgccgtgtctgcgctgagcgcgggcgtcatcacccgtaataccagtctgtttgaccccggctggtggcagttgcctggctctgagaaacgctaccgcgactggaaaaaatggggccacggccatctgaacgtgaccaaatcactggaggagtcggcggataccttcttctatcaggtcgcctacgacatgggtattgaccgtctgtctgaatggatgagcaaattcggctacgggcattacaccggcatagatttggcggaagagcgttccggcaacatgccaacccgcgaatggaagctgaagcgctttaaaaaaccctggtatcagggtgacaccattccggtagggatcggccagggctactggacggcaacgccgctgcaaatgaacaaggcgatgatgatcctcattaacgatggcgttgtgaaagtgccgcacctgctgcaaagcaccgttgaagacggcaaaaaagtgccgtggatacagccgcacgagccgccggtgggtgacattcattccgggtactgggaaatcgcgaaagacggcatgtacggtgtagccaaccgccctaacgggacggcgcacaaatatttcgctggcgcaccgtataaggtagccgcgaaatcaggtacggctcaggtcttcggtctgaaagcgaatgaaacttataatgcacataaaattgccgaacgtctgcgtgaccacaagctcatgacggcgtttgccccttatgataacccgcaggttgcggtggcgatgattcttgagaacggcggcgcaggcccggcggtgggtaccatcatgcgtcaaatcctcgaccacatcatgctgggtgacaacaacaccgaactgccagctgaaaacccggcagccgctgcggcggaggaccaataatcatgacggataatccgaataaaaaatcgctgtgggacaagatccacatcgaccctgccatgctgctgatcctgctggctctgctggtctatagcgccctcgttatctggagcgccagcggccaggatatcggcatgatggagcgtaaaatcggccagatcgccatgggtctggtcattatggtggtgatggcgcaaataccgccgcgcgtgtacgagggctgggcgccctatctctatattttctgtattattttgttggtggcagtagatgctttcggcgccatctcgaagggggcgcaacgctggctggatctggggattgtccgcttccagccgtcggaaatcgccaaaatcgccgtcccgctgatggtggcgcgctttattaaccgcgacgtctgcccgccgtcgttgaaaaataccgccattgcgctggtgctgattttcctgccgacgctgctcgtggccgcacagccggacctcggtacttcaattcttatcgccctctccggcctgttcgtcctgttcctgtccggcctgagctggcgtctgatcggtatcgccgtggtgctggttgccgcgtttatccccatcctctggttcttcctgatgcatgattaccagcgtcagcgcgttatgatgctgctcgatcccgagaccgatccgctgggcgcaggctatcatattattcagtcgaagattgcgattggctccggcggcctgcgcggtaaaggctggctgcacggtacgcagtcgcagctcgaatttttaccggaacgccacaccgactttatctttgccgttctggctgaggagttagggctggttggcatcctggtgctgcttgcactctacgtgctgctgatcatgcgaggtttgtggattgccgcgcgcgcgcaaaccacctttggtcgcgtgatggcaggcggattaatgttgattttgttcgtttatgtcttcgtaaatattggtatggtgagtggtattctgccggttgttggcgtaccgctgccgctggtgagttacgggggctcggcactgatcgtgttgatggccgggtttggtatcgtcatgtcgatccatacccacaggaaaatgttgtccaaaagcgtataaaaataaggggatcgcaatgcgtaagcagtggctggggatctgcatcgcagcaagtttacttgccgcctgtacaagtgatgatggtcagcaacaggcaaccgtcgcgccgccgcagcctgcggtctgtaatggcccgattgttgagattagcggtgccgatcccgtttatgaaccgctgaacgccagcgtgaatcaggattatcagcgcgacggtaaaagctataaaatcgttcaggatccttcccgtttcagccaggctggctatgctgccatctatgacgctgagcccggcagcaatctgaccgcgtcgggtgaaaccttcgatccgatgcagatcacggcggcacacccgacgttgcctgtcccgagctatgcacgcatcactaacctggcgaatggccgaatgatcgtggtgcgtatcaacgatcgcggtccttacggcaccgatcgcgtgatctccctgtcccgcgcggcggccgaccgtctgaacacctcaaacaatactaaagtgcgtatcgacccgattatcgtggcgcaggatggttcactgtctggcccgggcacggcctgtaccacggtcgcgaaacagacctatgccctgcccgctcgcccggatctgagcggtggtatggggggcgcttcaacgccggcagagcccgcacagccgcagggtgaagtgcgtgctatcagcaacgatacgctgcaaagtgaagacgcgaccggcgccccggtgaaaagcagtggtttccttggcgcacccaccacgttagcgccgggcgtgattgaatcaaatgaacctgccccagcgcctgcgcccgtcgctgctgcacccgctacacaacccgccccggtgaccgcgcctgctgctacgcagactgcggcgcctgcgacggcgagcggcagctacgtggttcaggttggcgccgtcagcgatcggacccgtgcagagcaatatcagcagcgtttaagcaagcagtttggcgtgccaggccgcgttgagcaaaacggtgcggtatggcgtatccagatgggtccgtttgccagcaaatcgcaggcagcgtccctgcaacagcgtttgcagagcgaggcgcagctccagtcgtttatcgctgttgcaaaataattattcggtggtatccgaaatgtcagtttgtgtaaagcacgttaacactctcatgatgaaagtcggatgcctgcccgtatagcatttgctatagtaaggcactttttttaattccatcacggatgtcgtagttctgaccatgaagaccactttttctgctcgttttgtgcagcgcatggcgctgaccacggccctttgcgctgctgcgttctccgcagctcacgcggacgacctgaacatcaagaccatgatccctggcgttccgcagatcgacgcggaatcctacatcctgattgattacaactccggcaaagttctggcagaacagaacgccgatgcccgccgcgatccggccagcctgaccaaaatgatgaccagctatgttatcggccaggccatgaaagcaggcaaattcaaagaaaccgacctggtgaccatcggtaacgatgcgtgggcaaccggcaacccggtgttcaaaggttcatcgctgatgttcctgaagccaggcatgcaggttccggtctctcagcttatccgtggcatcaacttgcagtccggtaacgacgcctgcgtggccatggccgattttgcagcgggcagccaggacgcgtttgtgggcctgatgaacagctacgtctccgccctgggcctgaaaaacagccacttccagaccgttcacggcctggacgccgagggtcagtacagctccgcgcgtgacatggcgctgatcggtcaggcgctgatccgcgatgtgccaaacgagtactctatctacaaagagaaagagttcaccttcaacggcattcgtcagaccaaccgtaacggcctgctgtgggacaacagcctgaacgtcgacggcatcaaaactggccacaccgataaagctggctataacctggtggcctccgccactgaaggccagatgcgtctgatctctgccgtgatgggggggcgtacgtttaaaggccgcgaaacggaaagcaaaaagctgctgacctggggcttccgcttcttcgaaaccgtgaacccgctgaaagctggtaaagaatttgcctctgaacctgtctggtttggcgataacgatcgcgcttccctgggcgtggacaaagatctctatctgacgatcccacgcggtcgtatgaaagatctgaaagccagctacgtgctgaataccaccgagctgcacgccccgctgcaaaagaatcaggtcgtgggtacgattaacttccagctggatggcaaaaccatcgatcagcgcccgctggtggtgctggaggaaattcctgaaggcaatttcttcggcaaaatcattgattacattaagctgatgttccatcactggtttggttaaaaattgaacacttgaaagtgtgattttgatccccatatactacgtatcagtaaaactcccgccccgtggcgggagttattattttttatacacacgccggagctgacatgaaaaccaaacttaacgaactgcttgaattccctaccccttttacttacaaagtaatgggtctggcgaaacctgagctggttgatcaggtggttgaagtggtacagcgccatgcgccgggtgactactctccatcagtcaaaccgagcagcaaaggtaactaccactcggtctcaatcaccatcactgcgacacacattgagcaggttgagacgctgtacgaagagctcggcaatatcgaaattgttcgtatggtgctgtagtccctcagcggttacccggtttgccgggtaacccacttccccgctgtgatatactccccgttacctattctcccttgtcttcggagacgtccttttgtaccaggataaaattcttgtccgccatcttgggctacagccttacgagccagtctctcaggctatgcatgactttaccgatatgcgcgatgacaccacccctgatgaaatctggctggttgaacacttgccggtgtttactcaaggccaggcaggaaaagccgaacatttgttgatgacgggtgatatcccggtgatccagagcgatcgcggtggacaggtaacctaccacggcccgggccagcaggtaatgtatgtcctgcttaacctgaaacgcagaaagctgggcgtgcgtgagctcgtgaccttactggaacaaaccgtggtgaacacgctcgctgagtacggtatcgatgctcaccctcgcgccgatgccccgggcgtctacgtgggaaagatgaagatctgttcgctggggctgcgtatccgtaaaggctgctcgttccacgggctggcgctgaatatcaatatggatctgacccctttccagcgcatcaacccatgcgggtatgccggtatggaaatgacgcaaatgcgccagtgggtcgataccgccacccctgagaatatccgccccgtgcttctgaagaagtttttagcgctgcttaacaatcctgactacgaatatattgctgcttaacacacttccggcagtggttcggttatttgaccagccactgcttaattgccgcatttacgctttacaataaaccgcatattctatattttcgagtcgcccatatattagcgtcccatattaattagaaccttaatagtaccatcaccgggtatcgtgtaacgtgcgtgataatcacccaactgcttgttttcgataaacaagggaaacttacgaaacactttacgaatctctgcaagcataataaataaattcaactatcattcatattgtgaatggatacggagtaagagcgtggagcctactaatttaccagccaaacgcctgaatgaaaccagcggcgaagataagccgcaaattttccggactttacgtaatattgatctcaatttattgactatttttgaggcggtatatgtccacaaaggtatcgttaatgctgcgaaaattcttaatctcacgccctccgctattagccagtcaattcaaaaattgcgcgcgatatttcccgatcccttatttattcgtaaaggccagggcgtaacccccaccgcgtacgccacccatctgcatgagtacatcagccagggtctggaatcgattctgggcgcgctggatctcaccggcagttacgataagcaacgaaccatcaccataggcacctctccctctgtgggcgttctggtcatgcccgctatttaccaggctgttaaacagcatgcgccacagctgctgatccgcaacgtgcccgttaacgatccggaaactcagctggcacaattccagacggaccttatcatcgacagcaacagcttcgcggccagggcattagggcataacgttctctataccgactctctggcgctcgtatgtcgtcagagtcatcctgctttgggcgcagctttgacgcctgaaaatttgcgtcattacgaacatgcaacctttatgtccgaggggcagggtccggatccgctgcgccagcgtattgacgaactgttcccggaccgtctgatcagcttcagcagttacaatatgtttacccttgcggccctgattggcagcagcgatttgctctgtattatgcctgtgcgtctcttcactctgcttcaaaaatgctggccgctggagagcattccattgagtcaacttacgacggaatctgttgaaatctcactgcattataacaagctaagcctgcgcgatccggtgctggaaaacgtcattaacgtgatccgccaggcgttctgatcccgcctttcagcacaagcccctgccgcaagcggggcaaaaggcacaaaacaacaactattttacaaattggcgacctggcaggctgctttatcgcccctttaaatgatatactgcctgtcgttcgttcaaaaatagttgataattacaacattcccttgaattgaaacgctttccttcgatattcgcaactggaacacgcacgctatgagtaaacccattgtgatggaacgcggtgttaaataccgcgatgccgataaaatggcccttatcccggttaaaaacgtggctacagagcgcgaggcgctgttaagaaaaccggaatggatgaaaatcaaacttccggccgactcttcgcgtatccaggggatcaaagcggcgatgcgcaaaaatggccttcactctgtctgtgaagaggcctcctgccctaaccttgctgaatgtttcaatcacggtaccgcgacatttatgattctgggtgccatctgcacccgccgctgtccgttctgtgacgttgcccatggccgtcctgttgcgcctgacgcaaacgaaccgcaaaaactggcgcagacgattgccgatatggcgctgcgttatgttgttatcacctccgttgaccgtgacgatctgcgcgatggcggtgctcagcattttgctgactgtattaccgccatccgcgaaaaaagcccgaacattaagattgagacgctggtgccggacttccgtggccgtatggatcgcgcgctcgatatcctgaccgcgacgccaccagacgtattcaaccacaacctggagaacgtaccgcgtatctaccgtcaggtacgtcccggtgcagactacaactggtcgctgaagctgctggagcgctttaaagaagcccatccgcatattccaaccaagtccggcctgatggtcggcctgggtgaaaccaacgctgagatcattgaagtgatgcgcgatctgcgccgccacggcgtcaccatgctgacgctgggccagtacctccagccaagccgtcaccacctgcctgtacagcgttacgtgagcccggatgagttcgatgaaatgaaagccgaagcgatggcgatgggttttacccatgccgcgtgcggtccgtttgttcgctcctcttatcacgccgatatgcaggcgaagggcgaagaagtgaaataaagctgtaaaatttatttacagtaaaacaaaaaaccggcctcgtgagccggtttttttatgcaagccttgcagcattgccattactctttgtgtgaaagcttctgtgcagtgatgtcatcttcggcgcttttctttgctgccgcgtcgtcatcgttcattgctttcttaaagcccttaatggcagcacccaggtctccacccagcgtgcgtaacttcttggtaccgaacagcaggacgaccagtgcggcaaccaccagcagtttggtaatactaatctcacccataaataccttctttacatgaaacaggctgcattccgccaaaaaacctgaacgtattaacggtcatttggcgcgtgcacacaatagcaatctgtaacaaggtgagtcaagcattgttgaaaaaaacatcacattaattgcggtggcgcaaacctgcggttgcgcagaacaggtaattgctgacgcgcaagcgctattcgggcggaaattatctccgtcagcaataacgcnnnnnnnnnnnnnnnnnnnnnnnnnnnnnnnnnnnnnnnnnnnnnnnnnnnnnnnnnnnnnnnnnnnnnnnnnnnnnnnnnnnnnnnnnnnnnnnnnnnnnnnnnnnnnnnnnnnnnnnnnnnnnnnnnnnnnnnnnnnnnnnnnnnnnnnnnnnnnnnnnnnnnnnnnnnnnnnnnnnnnnnnnnnnnnnnnnnnnnnnnnnnnnnnnnnnnnnnnnnnnnnnnnnnnnnnnnnnnnnnnnnnnnnnnnnnnnnnnnnnnnnnnnnnnnnnnnnnnnnnnnnnnnnnnnnnnnnnnnnnnnnnnnnnnnnnnnnnnnnnnnnnnnnnnnnnnnnnnnnnnggcgtctccgctgctgccgcaaccgtcacccccagcggatcgacaaccctgctctgcccgatatttttgttaccacattcacccgcggctaccacgtaacaggtggtatccagcgcgcgtgctgccagcagcgtcgcccagtgatgctccttaagcggtcctttgacccacgcggcaggcagaaccagcacctcggccccctgcaatgccaggttcagcgccagctcgggaaaacggatatcgtagcaggtcatcaggccaatcttaaaaccctcgatctcaatcagcggcggaattacactccccggatcgaccaggcgcgactcctgaacgctgaacgcatcatacagatgaagtttggcgtagctcgcgacgatggcaccctcacgtatcgccaccagcgtgtttaccgcgcgccccggcgaggacggaacatggaccgtcaatatggtggtgagcgtgttgccaacgctttcggccagcagtcgtttcagaaacgccccttccagcgtttgcgcagactttaccgacaggtctggatcgccatcatcacgggctagtaacgcctcgggaagtaccagcaacgacgcccccttttgcttcgcctgatgcatcagggagacgcatttttccgcgttttcattccagtccggcgtcaccgcgaactgccctactgcaacatacataattgtctcccggttaaaaacagcgttacactcgacgcacttacacagcaaatagcaggtattgacagtgttacaactacttatagccgtttttattggtggaggcacgggtagcgttgcgcggtggctcttaagcatgcggtttaaccccctgcatcaggccattccgatggggacactggcggcaaatctgatcggggcgtttattattgggatggggctggcctggtttaatcgcatgaccaacatcgaccctatgtggaaggttctgattacaactggtttctgcggcggcttaacaacgttttctaccttctctgcggaggtagtatttctgtttcaggaaggccggatgggctgggcgctgaccaacattgccgttaacatgcttggctcgtttgcgatgactgcgatcgcattctggttattttcctccgccagcggacattaagcgcggcaaccttaatgttggcttaatttttctctgtcactcttggctcaatattgaacgagggtgatagcatgaaagaaactctgtcaggcgtgggtatggtattgctaagcgtcgcgattgtggccagcttcctgaagatctatcttattggttgattcagaacgaaaaaaacccgctcattgagcgggttttgaaattcttgctgacgcgtctgaattacagagcaattacgttagcagcagaagggcctttggcaccgttagtgatttcgaactctacgcgctgaccttcagccagagttttgaaaccattagactggattgcagagaagtgtacgaacacgtctttgctgccatcttcaggagtaatgaaaccgaatcctttggactcattaaaccacttaacgttacctttaatcttagacatcaaaattacctttacattaaaaaacgacacaaatgctgtgtcgggtatcagtacaacaattgtgaggcgttttgtccagcggatctttgataaaaagtgacaaaagtcgcgttaattttcgctgttcgatttttatcctttacatttcaatgtctgtgcgttttttggccgatttagcagaaaaattcagttaaaactgaaaccgcatccaggcaaagtaaacgttaccgttgttataggtacccggtatgtaggtcatctgaaacgttgccggaccatagccgatggaggcaagcggcagcagtaccggaacaggaatgtatttccagttatcacgcgccgtgaaccctgccgtatagcccagccccagacggaagttgtcgtctgataacggacgccaggttttttcccagccgtagccaccaataggctcccatttattgtaggagtccttaaacgccatcaggtacaggccatgccagttacctttttcatcccagcgagactgaccgaagccggccccccacggacgctcgttataacggtcagttttttctttatcgtaggcaaaacgtgcatgccacgtaatggccggaatatagagatcgtaatgctcaggttcattccatgtttgcgcaacgttatccgtgaaggtggtgaaccagcctttatccgctgtattgctgtctgcattaaccgcagacgcaaacgataactgcccaataataaacaacaaaatcagggggaatttaattcgtacaatcacaatgccattaccatatttagtattcggtgcagaccttaacacagaatacttgaatgaacgcttaacagcatgggtgttattcctaattaccatcccgttcctgggaataatctgaggatacataaactgcatgcctgaataagcacatgcagttgacatatttaacgttgatgtaacaatttgtagagtgcgggaataactaacatcgataataacggtgccgttaccatgccaccaatcatcggcgcggcaatacgttgcatcacctccgaaccactcccactcccccacataatgggcagcagtcctgccataatagtggcgaccgtcatcaccttcggacgcacgcgcagcacggcaccttcgtggatcgcccgcatcagcaccgtatttcccccttctggctccagcctgtgatatttatcgagcgcatgnnnnnnnnnnnnnnnnnnnnnnnnnnnnnnnnnnnnnnnnnnnnnnnnnnnnnnnnnnnnnnnnnnnnnnnnnnnnnnnnnnnnnnnnnnnnnnnnnnnnnnnnnnnnnnnnnnnnnnnnnnnnnnnnnnnnnnnnnnnnnnnnnnnnnnnnnnnnnnnnnnnnnnnnnnnnnnnnnnnnnnnnnnnnnnnnnnnnnnnnnnnnnnnnnnnnnnnnnnnnnnnnnnnnnnnnnnnnnnnnnnnnnnnnnnnnnnnnnnnnnnnnnnnnnnnnnnnnnnnnnnnnnnnnnnnnnnnnnnnnnnnnnnnnnnnnnnnnnnnnnnnnnnnnnnnnnnnnnnnnnnnnnnnnnnnnnnnnnnnnnnnnnnnnnnnnnnnnnnnnnnnnnnnnnnnnnnnnnnnnnnnnnnnnnnnnnnnnnnnnnnnnnnnnnnnnnnnnnnnnnnnnnnnnnnnnnnnnnnnnnnnnnnnnnnnnnnnnnnnnnnnnnnnnnnnnnnnnnnnnnnnnnnnnnnnnnnnnnnnnnnnnnnnnnnnnnnnnnnncgccgaattctgccgccactccggaaagggcgataaagccaacggcccccgccactgacaaattatattcaagcagccacagtaaccacacgcccccaataagcgcgaacggcaatgtccccattattatcaggacatttgatatccgcctgaaggttaaccataaaaggacgaatataatcatcagcgtgacaggtaaaactattttgagcgtcgcggtcgcccgttccagatattcaaactgcccggaccaggagagagacacgccctgcggcaataccaccttctcctccacccgtttttgcatttcatccacggcggacttcagatcgcgcccgcgcaagtccacgtagatccagctggaaaggcgcgcgttttcacttttgagcatcggtgggccttccgtcacgacgatatcggccaattcccccagcgccacctggctaccgctggcggtcactaccggcaacacccgcaacgtgtcgacgttatcacgcaaatcgcggggataacgcaggttgatgggataccgctcgcgtccctggatcacctcaccaatgttatcgcccccgaccagcgtggagaccaggctttgcagttcatcgacggaaacgccgtagcgcgcggctttttgccgatcgatacgaatatccacgtagcgcccgccttccagacgctccgccagcgcagaggagacgccaggaacgtccttcaccacctgctcaatctgccgggccacgcgctcaatgtcggcaatattattgccgttcaccttaatgccgacagggcttttgatcccggttgccagcatgtccaggcggttacggacaggcggcacccacacattggcaatacccggcagcgacacggttttatcaagctcctccaccagcttttgcggcgtcattcctggccgccactgctcgcggggcttaaagtgaatggttgtttccagcatggttaatggcgcgggatcggttgccgactccgcgcgaccggctttgccaaacacgctcgcgacctccggtacgcttttgatcaagcggtccgtctgctgaagcagccgcgatgcctcgcgagcagagatccccggcagcgtggagggcatatagagtaaatccccttcatccagcggcggcataaattcgcttcccaggcggctcagcggccagagcgtggcgatcagcagcagacatgccagcgccagggtcgttttcgggaaggtcagcaccttgtccagcagcggctcatacaggcggatcaggaggcggttgatcgggtttgccttctcatccgggattttcccgcgaatgaaaaagcccattagcaccggcaccagggtgatcccaagcccggcggccacggccatcgaccaggttttggtgaacgccagcggcgagaacattcgtccctcctgcgcttccagcgaaaaaaccggtataaatgacagcgtgatgattaacaggctgcaaaacagcgccggtcccacttcgaccgccgccttttccgccagacgccagtattcccccggcgcgggctccttgcccggattatcatgccgccactgctccagcaccttgtgcatgttttcaatcatcacaattgccgcatccaccatcgccccgatggcaatggcgatcccgccgagcgacatcatattcgcgttaatgccctgatagtgcatcaccacaaaggccccgaggatccccagcggcagagagaccatcgccaccagcgcggagcgcaggtggaacaggaacagcgcgcacaccagtaccaccacggcaaactcttcgagcagcttgtgcgtcagcgttttgaccgattcctcaatcagcgtggaacgatcgtagaccggaacaatctcgacgccctgcggcagcgttttttgcagctcgctcagtttcgcttttaccgcacgaagcgtttccagcgcattctgcccgtagcgcatcacgatcacgccgccagcgacctccccttcaccgttaagctccgccacgccccggcggatctccgggccaatgccaatggtggcgacatctttcagcaggacaggtacgccatcgcgggtggcgatcaccacattgcgaaaatcctccagcgagcgcaaatagcctgttgtccgcaccatatactccgcttcgcccatctccagcagggcgccgccgctctctttattggcggcctgcaccgcgccggatagctggctgtgggtaatattcagcgcgcgcatcttcgccgggtccgccacgatctgatactgacgcaccattccgccaatgcttgccacttcagatacattcggtaccgtcttaagctcgaacttaagcgtccagtcctgaagggcccgcagatctgccaggctgtgttttccactacggtcgatcagcgcatattcgtagatccagcccacgcccgtcgcatctggccccagcgacaccttcacgcctgccggaaactgcgcctgtacctggcttaaatattccagcacccgggatcgcgcccagtagagatcggtgccatcctcaaacagcacatacacataagcgtcaccaaacattgaaaaaccacgcacggttttagctcccggcacagacaacatggaggttgtcaggggccaggtcacctgatcttcaatcacctgcggcgcttttccggggtaactcgctttgataatgacctgcacatcagacagatcgggcaacgcgtccagcggcgcgcgctgcaccgcccaccagccccagccggccatcatcagcgcggccaggatcaccagcaggcggttacgcaacgaggcgcgaatcacagcggcaatcatggcgtcacctccggcatcacgctacgcaggctggcttcggaatcaatgaggaattgcccggacgtcannnnnnnnnnnnnnnnnnnnnnnnnnnnnnnnnnnnnnnnnnnnnnnnnnnnnnnnnnnnnnnnnnnnnnnnnnnnnnnnnnnnnnnnnnnnnnnnnnnnnnnnnnnnnnnnnnnnnnnnnnnnnnnnnnnnnnnnnnnnnnnnnnnnnnnnnnnnnnnnnnnnnnnnnnnnnnnnnnnnnnnnnnnnnnnnnnnnnnnnnnnnnnnnnnnnnnnnnnnnnnnnnnnnnnnnnnnnnnnnnnnnnnnnnnnnnnnnnnnnnnnnnnnnnnnnnnnnnnnnnnnnnnnnnnnnnnnnnnnnnnnnnnnnnnnnnnnnnnnnnnnnnnnnnnnnnnnnnnnnnnnnnnnnnnnnnnnnnnnnnnnnnnnnnnnnnnnnnnnnnnnnnnnnnnnnnnnnnnnnnnnnnnnnnnnnnnnnnnnnnnnnnnnnnnnnnnnnnnnnnnnnnnnnnnnnnnnnnnnnnnnnnnnnnnnnnnnnnnnnnnnnnnnnnnnnnnnnnnnnnnnnnnnnnnnnnnnnnnnnnnnnnnnnnnnnnnnnnnnnnccggacgtcaccaccttatcgccctctttgaccccggacaggatcgccgtccagccctgcgccgtcaggccggttgtcaccgtcacaggctggaaataaccgtccccgctggccagcagcagacgcgcagactctccgctgttaatcaccgcctcttccggcaccgccagcaccggcgggcctttcatctcttccgcacgcctgacggagaggtacatgcctggcttcagcttatgtgcggtattttccagcacgatacgggctttcagggttcgcgtggtcgcctccatctgcggcagcaattcgctgaccgtgccgtggaattgctcccccggccagctttctgacgttgctaccacgttgctgcccactgccagagactgcgcctgcgtttgcgggtagtcgaccaccagccagacaggatcgaggctggcgatctcaaacagcggcgccgttgcggtgatttgcgccccttcccgcacgtccagcttcaccacatagcccgcccggtcagcgcgcagggtgagcgtggtctgcggtttaccgctacgctccagcaaacgaatgacctcttccggcataaactgcaacgccagccgctcgcgtgcggcgcgggtcaatgcggcatcgccaagctgacgaaccgcgaggtactcctgctgggcggtggtccattgcgggatccacagttgcgccagcgcctctccggctttcacctgctgctgtggcgcattaacaaacaattttgacaccacgccattggccggggctgacaccaccgagacgttacgttcatccgttgcaaccgtggcaaaggccgagaacggcgaaaccagctggcgcatctcaacgttggcggttttcatccccaggttttgctgctgttgagtgctgatgaccacgcctgacgccgcctgtgcttcatcggcgtagcgcgggaccagatccatatccataaagggggatttacccggcttatcgaagcgctgaccgggcaccatagggtcgtaccagtaaagcaccttacgttcagagggttgtgcagccgcagccggctgatgcgtctgcttctttccgacaaaatagccgccagcggcagctatcgcgatggcaatcgccattaacgttgtttttttcattgcgccagctcctgcgggatcagccagttcacggcagcccaggttcgcgccatttcgcgctccgcctggttcaccgccagttccgtatccagtacgccacgacgcgcctccagcagggccggaagcgccgactgtccagagcgatattgcgccgtcagcaccgccagccgttgacgttgcaacggcagtacctcgtcccgctgacgctgccacaccgtttgcgcagcctgatactgcgccaccagcgtttgcacctgggcaatgtgttcgcgtttgagcagcgtgagttgatccaccgcctgcattgagcgggaaacatcggcggcgtaatccttgtcctgacgttttgactggaacagaggcagatccacgctgaacatcacgccagccatatcgtcgtagccttcggcgcggtgggcgtaatagacctccacatccacatcgggtatcgccgccacggcagattgcgctgaacgcgctttcgcggtctcggcttcacgtcgtgcggcctccacttccgggtgcctgacgatcccctcctgcaacgttttttcatcggcaggaagacgctgatagcgcggcaacggaccgcgaaccgccgtaatcgcgtgccccgtaagctccagcagacggctttgcgccagctgcacatcccgctgcgccagcgtctctttgtcgcgcatggcgctgaggatcatttgcagggccagtacgctgtccggcgtggcgcttcccgccccgacgctcgccttctgcacgccccgctggcgttcggtttcacggaccagcgttctggccgtgttcagcgcctgctgggccagcgccagatccagccaggcctgggcggtatcacgctgaagcgcggcgcggacggcttcggattttgccagcacgcttcgcgcctgcgcctgaaaggtctgcgctttacgttcccgcttctctgagctgacgtagctttgcatgatgccaaccttctgcatggtcatcccttcgcgcgtcagccgccgatcgttgctgccctgtaccggcacgttttcgatgccgaatttcagttttgggtcaggtaattgcctggcggaatccgccatcgcatccagcgcctgcgcttcgttacggctggcggagagttctgctgagtagcgctgggcttcggtgagggtgtgttcgagcgtccacggctccgcctgcgcggcggaggttaacaggccgaacaacaccccaccgagccacaggctcagtgtgtgttgtttcatggtgacctcgcttagcgtgctggcgtcagcgagataatctggaaaccgtcacccgcacgctcaagcgtgaaggtcacttcatcccctggtttggcgtcactcagcgtggcgccggcagataaagtaaacggcatggtcattgctggccattttagttccggtatggcctcgtgccggagcatgacggcgctgtcagagatcgactgaaccacgccgtggccctgccaggtctggtttgcctgaacggtataagaagcgaaagagacggacgcgccaaccagcgcggaaaggaatatagtacgcatgaaaaaaactcctgttaaacgttaagtaaataaaatcaacgaattaacaggtttttactccnnnnnnnnnnnnnnnnnnnnnnnnnnnnnnnnnnnnnnnnnnnnnnnnnnnnnnnnnnnnnnnnnnnnnnnnnnnnnnnnnnnnnnnnnnnnnnnnnnnnnnnnnnnnnnnnnnnnnnnnnnnnnnnnnnnnnnnnnnnnnnnnnnnnnnnnnnnnnnnnnnnnnnnnnnnnnnnnnnnnnnnnnnnnnnnnnnnnnnnnnnnnnnnnnnnnnnnnnnnnnnnnnnnnnnnnnnnnnnnnnnnnnnnnnnnnnnnnnnnnnnnnnnnnnnnnnnnnnnnnnnnnnnnnnnnnnnnnnnnnnnnnnnnnnnnnnnnnnnnnnnnnnnnnnnnnnnnnnnnnnnnnnnnnnnnnnnnnnnnnnnnnnnnnnnnnnnnnnnnnnnnnnnnnnnnnnnnnnnnnnnnnnnnnnnnnnnnnnnnnnnnnnnnnnnnnnnnnnnnnnnnnnnnnnnnnnnnnnnnnnnnnncggcggccccacagcagggggggtaacggaccacgcagaatggcttgcagacgagcactctggggtcgttaaggtcagggtcatggcggcaggcagcgccaccagatgcggctgggcaggatctttttgtacctgatccggcacacaatgcttttcacacagcggtgaagcaccggcagcataatgcggccccggttgcgccatcatctccatatgctggatagtggccacctcaccgcgcaaatccattgaacattgatgggaggcgacggccacctgactctggatcaacagccagccaaacgccagcaaaaacatcagcagatgtttttttataaagcgcaggcgatatgtccagctggcgtgcatattcagatcgtcggatagggtaaaagtgaaccgagtataagcaggcaaaagaatgaaagagaagtggttttaaagagatttacgttttaaatcgattctcggcaagtaatactcaaaaccttaacacttcaccatcaatttaatgacatataatatctattcatcaggtcaataacgtcttaatataaatgacgcagggttagcaaaaatatcgtcatcagtgcctttagtagtctctttcttgattttaatcagcaaggactggacatttattcggcacatttcagcttcttttttattgattatttgtctctcgggcagcaaggatacaggggaaatcatgcttacttttctcgaactcctcattggagtcgtggtcattgtcggtgtagcacgctacatcattaaaggttactcagccaccggcgtgctatttgtcggcggcctgacgctgctgatcattagcgcgctaatgggtcatcagattttacccgccagcgaagccagcaccggatataccgctaccgatattgtggaatatataaaaattctgctgatgagccgcggcggcgacctgggcatgatgatcatgatgctctgcggttttgctgcctatatgacccatatcggcgcgaatgatatggtggtaaagctggcttctaagccgctgcaatatattaattccccctatctgctgatggtcgcggcctatttcctggcctgtctgatgtcattagccgtttcctcagcaacgggtcttggtgtgctgttaatggcaacgttattcccggtaatggttaacgtcgggatcagccgtggcgcagcggcggctatttgcgcctctccggcggcgattattctctcccctacttccggtgacgtagtgctggccgcaaaagccgcggaaatgtcgttgattgacttcgccttcaaaaccacactgccgatctccatcaccgctattctcggcatgggcgtggcgcatttcttctggcagcgctatctcgataagaaagagaacgtcagccacgaaatgatggacgtcagcgaaatcaccactaccgccccggcgttttattccatcctgcccttcacgccgattattggcgtgcttattttcgacggcaaatggggcccgcagctgcacatcatcactatcctggtgatctgtatgctgctggcggccatcctggaattcgttcgtggttttaatacccagaaagtgttcacgggtctggaagttgccttccgcggtatggcggatgccttcgcgggcgtggtgatgctgctggttgccgcgggggtgtttgcccaggggctgagcaccatcggctttattcagagcctgatctctatcgccacctcgttcggctcggccagcattatcctgatgctggtgctggtggtgctgaccatgctggcggcgatgaccaccggctccggtaacgcgccgttctacgcctttgttgagatgatccctaagctggcgcactcctccggcatcaacccggcttacctgtccattccaatgcttcaggcttccaacctgggtcgtaccatttctccggtatcgggcgtggtggttgcggttgcggggatggcgaaaatctctccgtttgaagtggtaaaacgcacgtcagtgccggtgctggttggcctgattatcgttattatcgccaccgaagtgctgcttcccggcgctgcctaagcgaaattcctgatttccaaaaagcgcctgcgggcgctttttgtgctttaataacccccagaaattaatcgcgcccaaccaatcaggaaagcaaatgttcaggaaggatatcgttatcccgtctggcgcagtagcgcttgcactctgtgtcttctcaattcaggcagatccgcttaagccaacccagtacggcgatttcgatcgctacgttctggccctttcctggcaaaccggattttgccagagcatggtcgaacgtaaccgtgacgaaccggaagagtgtcgcctgcaaaaagagagcagcaacaaaaccgattttctgaccgtccacggcttatggcccgcgctgccgaaatctattgccgctcgcggagtggatgaacgccgctggatgcgcttcggctgtgccactcgtccggttccgaatatgccggaagcaaaagccagccgcaaatgtgacgccgcagagaccggactatcgctaaccggcgcggcgaagctgaacagcgtgatgcccggcgcgggcggcaactcctgccttgaacgttatgaatacgcgaaacacggcgtctgctttggttttgatcccgacgcttacttcggcaccatggtgcgcatgaaccaggaagtgaagcacagcgcggcaggaaaatttctggcggaaaattatggcaaaaccgtccgccgcagcgacttcgatgcagccgtggccaaaagctgggggaaacagagcgtaaaagcgttcaagcttacctgccacggcaatccggcttatctgaccgagatgcagatctcgctgaacgccagcaccatcaacaacccgctctctgccggctcctttgcgccacagccgcatccgggcaactgcggcaaacagtttgtcattgataaagccggttactgatgctgcgccgggcacctttttgcccggtttttcattgatttccgtgatatgacgattaacctcacacttccgctcacacgcatcatttttccagcaaaagcattattaatccggtaaacatcactgaaacctccccgccataatcatggcgttatctacaggaggaatttcacatggctaaaaaactagattgcactgtgcgcctgcccgatgggcctggcacataccttcatggcagcccaggcgctggaagacgcggcgacggaagccggttatgaggtaaaaattgaaacccagggcgcggacgggatccagaatcgcctgaccccacaggatattgccgacgctgacattattatccacgccatcgcgatcaccccggaagacaatgagcgcttcgaaacgcgcgacgtgtatgagattacgcttcaggacgctattaaaaacgcggcaggcaccctgaaagagatcgaagagatgattgcagcagaacaataataatcctcacacccaggggttttcgtcatggctattaaaaaacgcagcgcggttcgcccggacagtcacgagggtgacacacttgccatcaaatccgcaccggttgccgccggtgcgtctttctggaaagagcttccacagcacattatgtcggggatatcccgcatggtgccaacgcttatcatgggcggggttatcctcgccatttcacagctcatcgcctacgtctggctggagatcccgcctgacaccggtattctcgacgcgcttaactctggcaaattcaccggtttcaatctctcggtattgaaatttgcctatctgaccgaatcgttcggcgggctgctgttcagcttcgccatcccgatgtttgccgcctttgtcgccaactctatcggcggaaagctggcctttccggccgggtttatcggtggccttgtcgccacgcagccgacgctggtgctgaactttgatgcggaaaaactgacctggcttgccaccaaacccgtgccctccacgtttattggcgcgctgattatcgccatagccgcaggctatctggtcaaatggctgaatagccgtattaacgtaccgcagtatctgctggcctttaaaagcacctttctgatcccaatcctctcggcgctgtttgtgatgctggcgatgtattacatcatcacgccgattggcggctggctgaatgcaggtatgcggaccgtactgctggcggcgggtcaggcgggctccatgatgtatgccatcgggatggcggcggccacggcgatcgatctcggcggccccattaacaaagcggcgggatttgttggcctggggctgacaaccgatcatgtcctgcccatcacctcccgcgccgtggcgattgttattccgcccattggtctggggctggccacgctgattgaccatcgtctgaccggcaaacgactgtttagtccgcagctttatccgcaaggcaaaacggccatgttcctcgcctttatgggcatcagtgaaggggccatcccgttcctgctggaaaatccgcttgcgacgctgccggcgtatatggcgggtgcgatcgcgggtgcgatgaccgccaccgcgctcggtgccgtgcagtggttccctgaatcggcgatctgggcgtggccgctggtcaccaatctgggggcgtacatgctcagtattgtggtcggggcggcgatcaccgcgctgttggtcgtgattattcgtaacagtctgcacaagcgcggaaaactcgctatcgacacgctgtaacggggtgaaccatggaattactgagaaggcttcgtgcctggctggctgcggaaaaactggacggcgtgctcatctcttcgcgccagaataaacagccgcacctgggcatttcaaccggttcgggatatgtgctggtgtcacaaaccgcggcacatatcctggtggatttccgttactacagcgatatcgcttcacgagcggcgggctatgaaatgcacctgcttaacacggagaacccgtttgcgcaggcggtgaaccagattattgcgaaggacaatctcgcccgtcttggctttgagggtgaatacgtgagctggcaaacaggcgtgctgtggcgcgatacgctgaataccaccctttgcagcacctcgctagacgcgctgcggcagataaaaaccgctgacgaaatcgaccgtatccgtgcagcatgcggcattgccgaccgcgccgcacgacacatccggcgtttcattcagcccggtatgcgcgagcgtgaagtcgctgccgagctggagtggtttatgaagcaggagggtgcggacaagccctctttcgacaccattgtcgccagcgggccgcgcggtgcgctgccccacggcaaagcctctgacaaagtgattatgcctggcgagatgatcacccttgatttcggcgcccaacaccaggggtattgctcggatatgacaaggacctttcttgtcgccgggcaaaacacgccgccggaggagcaccctctctatgcggtgtaccagatcgttctggcggcacaacaggcggccattgatgccatccgccccggcgtttcctgtcatcagatcgatagcgccgcacgttccgtgattgaacgtgcaggttacggcccgcagttcgggcataacaccggtcatgccattggtattgatgtccatgaaaatccacgtttttcccctaccgaccgcaccccgttgcagcccggcatggtgctgaccgttgaaccggggatctaccttgaacaccagggcggggtacgaattgaagatgtggtgctggtgacggaaacgggcgccgaggtgctttataccctcgacaaacggctattgctgacgggagaacaagagtggacagagatttactgcgcgccctgagcgaagcagacgccattgcggcctcagagcaagaggtgcgcgacatcctgctcagtgaggcgcaaaaataccataaagaggttcagtttgatgggctgggttccgtgcttatccgcgtcaaccagagccggggcccgaaggtgatggtctgcgcccatatggatgaagtcggttttatggtgcgtagcgtctcgcgcgaaggggccattgatgtcctgcccatcggcaacgtgcgcatgatggcccgtacccttcagccggtgcgcatcaccacgcgtaacggggaaaaaataccgggactgctggatggggatctgaaaggagaaaacgttgaaaatttacatgtcgacattggcgcgacgtcggcggaggaggtgttcgccgccggtatcgacgcaggcgaccgcgtggcgttcgatacaccctttcagacccttccccacaatcgggtgatgggtaaagccttcgacgatcgtctcggctgttacctgctgatcgcgctgctgcgtgagctgcaccagacgccgctcgactgcgagctttggctggtggccagctcaagtgaagaggtcggcctgcgcggcggccagaccgccacgcgcgccattcatcctgatatcgcgctggtgctggataccgcctgctggtcaaaaaatttcgattatggcagcgccaaccatcgccagatcggtgcgggcccgatgctggtgctgtacgacaaaacgctcatcgccccagccaaactgattgcgctggctgagacgatcgcgcgctcgcaagggatcccgctgcaaaaagacatgttcagcaacggcggaacggacggcggggcgatccatctctccggcactggcgtgccgactcttgtgcttggtcccccaacccgacacgggcactgcgcggcatccattgccgacgaaaaagacattcatcacacccaacaactgcttgtcgcgcttgtggcatgcatgaaccgtgagaccgtggatcatctgacggacttcagatgctgatctcacgcggccaggaggaagtatgctttcaattgaatttttctgcccactgcccaacggcctgcatgcgcgtccggcctgggcgttaaaagagcagtgcagcgcatggcgcagcgacatccgttttatcaacagacggcttaacactcacgcggatgccaaaagctcgctggcgctgatcagtaccggtacgctgtttaatgacagctgcgtgctggaaattaacggcagcgacgaggagcaggcccgacgcgtgctggaggcgtatctcaccggcgcgtttatcgacagcgacagtattccctccggcgacgcgccgcacgttgcgcatcccctgccccgttcgcttgtaaggcttgctccccaccttcagcacggcattacgctcgccagtggcatcggggctggcactctgcgaggctggcagagcgataacctcaaacgttattgtcagatccccgcctcgccggaagatattacccgcctggaacacagcctggcgacgctggctgaacagctcaaccaccgcctgcgcgggctggacggcgagagtaaaaccattctcagcgcgcatctttcgctgatccaggatgaggagtttggcggcaccatacgccgactgatcgccgaggagcggctaagccttgcggaggcgatcattcgtaacatggagctgatctgcgacaagctgtcgctctccgccagcgactacctgcgtgaacgcgtcagcgatattcgcgacatcagcgagcagcttcttaacattacctggccggagttacagcaaacctccgcattcaccctcagcgcccccaccattctggtggcggaagatctgacgcccagccagtttctcagcctcgacacgcagtacctgaaaggcatggtacttgaaaaaacaggccggacgtcgcacacgctgatcctggcacgcgcggcctccgtgcctgtgctgagtggtttaacggtcgcctcgctggcgccgttgatgggaaaagaggtcattctggacggcatctgtagcgtgctggtcgttgaacccaacgacgcggtgaatgattactacagcgtggcgcagcgccttgccgaccgacgccaccagcagcagatcaaagatgcgggtcttcctgcgctcacccgcgacaacgtgccggtagagattgccgccaacatcggcagcgcgctggaagcgcccggggcgtttacctgcggcgcgcagggtatcgggctgtttcgcactgaaatgctgtatatggacagagacaccgcgccggacgagcaggagcaattcgaagcctatcagcaggtgctgctctccgcgcagggcaagccggtcatctttcgcacaatggacatcggcggcgataagcatctctcttacctgaacattccccaggaagaaaaccccttcctcggctatcgtgccgttcgtatttatcccgaatttgccgatctcttccgcacccaactgcgcgcgatcttacgcgcaggcgccagcggcaatgcgctgttgatgatcccgatggtgcacagtctcgatcagattttatggatcaaacaggagctgcaaaacgttcgtgacgccctggcctcacaggggttacgtcacaccgcacacctgccgctggggatcatggttgaagtgccttcagtctgctttatcatcgatcacttctgcgaagaggtggatttcttcagtatcggctcgaacgatatgactcagtatctctacgctgtcgatcgcaacaacccgcgcgtttcggggctgtataaccccatcacaccgtcttttttacgaatggttcgccagatcgtcaccgcagcgcatcgtcacgggaaatgggtcggcatttgcggggaacttggcggagagcagcgctacctccctcttctgcttggtctgggcttagatgagttcagcatgagcgggccgcgcatccctgcggtaaaaacccagctgcgtcagctggacatggcaacctgccgggcgctggcggaaaaggcctgcgacagccgcagcgcagaggaaattgaagccctgctggcggatttcacaccggaagcgccgccgcgtcccttgctggccctggagactatcgtggtcaatgagccgctgacctcaaaagagcaggtgcttcagttcttatgcggaaatcttgcgattcatggcaggaccgaaaacccgctggagcttgaagaagatctctggcagcgcgaagagattgtcaccacagccgtcgggtttggcgtggcgatccctcacaccaaatcgcaatggatacgccactccagcatcagcattgcacgcctggacaaggcgattgactgggagtcggatttgggcgacgtcgagctggtgatcatgctgacgctcggcgctcaggaagggattaatcacgtgaaggtcttttcccagctggcgcggaagctggtcaataaaacgtttcgcgagtcgctgtttgcagcaatgacgccgcaaagtatcctggatctgctgaacgctgaaatcatgttctgactgtcactgaaagcgtgcgcgatactcccccggcgtcaggccaaactggcgccggaacagacggctaaaatagtcgctatcggcatagccgcagcgcttcgccacttcccccaccggcaggtggtatttttgcaggatggttctcgccttcgccatacgcacccaacgaacgtaatccacaaaactcatcgtcccctgttgggagaacaggcgtgacagatggttagccgaaatattaaatagcgcggcgacgctgtcccgcgacagggattcagcatagttttcctgcacccagttacaaatgctctgatagaggaaatccccgcgcgacagtcccggttcaggcagcgacgacaccactttccggcaccagtgcagcaggctcagcaccagcggttgaataatggcctgatcctgcggggaagcgctcaggtgtgtcagggccatcagcatcgcagcacattcgcctcgttcaggatgaggaagctcaacgtgtcgctgcgcaggcacggatcgcccgtgacgggtatcatgaaacaccagccccagccacgacggcgcaaaaagaatgctcagcagcatgaccggtcgttcaaacaccgggacgctggcggcctgggcgggaagaaacagcatttccccctggcagagggtctgctgcccggtaaccagtctgttgccatattccccgcgaagaacgacatcaagccgtggccagtcgcggctcacgcttccgacagcgtcagacgcgccacgttgagcaaaccagactcgccccagctgctgtgggttgagcaccaggccgctcaacagatcggcaaaaaactgctgatcggcgggcaacagggttgcgcgcatatcaccccctgcgcgcatccgggcgtaccaggtcgaagcgatggctgtcactgatggcgtagtaggctgtaggtccacccgcacgcagaatgggctgcgctttcgcggtctggtaaatcccctcttccagcaaactctcggcgatatggacgcccacgacttcgccgagcaccagccaggtatcaatcggcgtcccatccgcgccggtaagttgaatgcactgtgacaatcgacactcgaaattcaccgggctttccgccacgcgcggcgagctcacaagctggctggctacgggcgtcaggccggcaaaggtaaattcatcctcgccatgtgggagcgtggcggaggtttcattcatcgcctcggccagatcccgcgttgcgaggttccagacaaactcccccgtttcggtaatattccgcacgctatccttccagccgttgcttgaaaaaccaatgatcggtgggcgatagttaaagcagttaaagaagctgtacggggcaaggttcagttgaccggccttatcacaggatgagatccagccaatcggacgtggaccgataatggcgttcagcgggtcgtgcggcaggccgtgcccctgagacggttggtaaaagtacatatcgctctctctacgctggggctgcaacgcgcattgcccgggttcagtctttccagcgtaacgaaatttccgttcagcgtgaatcgggacgccgggtttattgccaaaaattcatatggcgcatgattgtgaccttcatcacttcaaacttacggtttcagacagtatcatcagataagttaaaccctcgctgccagacggcgagggttttcttttggattggtttctgcgttacacgcagcattaacgacatggagtaaaaatgtccagacctacgattatcatcaatgaactcgacgcagaacgtattgaccgactgttggagaaaccagaattcgcctcgctgccggtatccgatgcgctgaacgaggagctcgaccgggcgcagatgtgtacgcctgagaccatgccgcatgatgtggtcaccatgaacagccaggtgaagttccgcaacctgaccaccggagaggagctcactcgtacgctggtctatccggcgcagatgaccgacagcagcacgcaactgtcggtgctggcacccgtgggcgcagcgctgcttggactgcgcacgggcgataccatccactgggaactcccgggcggcgcctcagctcacctggaagtgcttgagctgctctaccagcccgaagccgctggcgattacctgcgttaatcccttctgaacaagcgaccccgctttgcacagaggatgcacccgcatcctctttccgcaaattcaccctattgtgctataccggacaaaaaccgcttaatccacgcttagtctgttgtagtgccgtggggacggtcatgggtgagatacttgttatcacactggtttttctcatcatcctggcgatcctcgtcgtggcggtgctgtatcttgagcgccactggtgagtgaggaacctcacacaacgccgccggggaaggcattcaccagtcccttcactttctgctgcgctgcctccggggtgtctgcgccaggcaccaggatcaccttgcggcactcctcctcccgtttttcgaagatcttataggcgcgttccgcatcagccagcggaagatagtgggtcacaatatcttctggggtaagcagccctttttcgatgagcggcagcagctctcccagccaggcatggacgtgggtctgccccatcttaaagctcagccctttatcgaaggcatcgccaaacaggaagccgtgaataaaaccggcgtacacgcccggcacgctgaccacgccgccgcgccgcaccgcagcaatgcactggcgcagggctttgccgctgctgccttcaattttcaggttactgaggatcgtttccgtggtgctgcctttggcctcaaacccgacggcatcaatcaccgcatccactccgcgctgtccggccgtttgctcaatgattttctccgccgcgtcgttatcgtcatcaaagttaatcgggatcgcgccgtagcgctcctgggcaaaccgcagtcgatagggatgatggtcaaccacgaaaatctgctctgcgccgagaagccgcgcgcaggcaatggtcagtaaccccaccggcccggccccgaatacggcgacgctggagcctttctggatctgcgcattttttgccgcctgccaggcggtaggcagaatatctgacaggaaaagcgctttgtcgtcagacagcagctggggcactttaaacggccccacgttgcctttcgggacgcgcacatactccgcctgtccgcccggcacgccgccgtaaagatggctgtagccaaacagcgcggcaggggcgggaatttgctttttgttcagcgccgcgccctgcccgcggttcgtgttttcgcaggccgcgtactgttgcatctggcaaaagaagcagtcaccgcaggcaatcacaaacgggatcaccacccggtcacctttctgcacgtttttcacttcgctcccgcactccaccacctcgcccataaattcatgaccaaagatatcgccgtgctggaccttgggaatttttccgcgataaagatgcaaatcagaaccacagatcgccgtggccgttacgcgcaggatgatatcgtcaggctgttcgatgcccggatcggggacattatcgacccgaacatgatgtggaccgtgataggtgagagctttcatgcaacctccgaaagggtgtgggtaagcttataaaagggtagctacctctcgggatctgccccggaatccggctgttttgagatttatcctggcgagataaaaaagtgctgtcgggattacagaaaccttttatattttgtggttgaatgatttcagcgtttataaacaaggagaaacggttatgtatcaaacaatcattatgccggttgatgttttcgaaatggaactgagtgataaggctgtacgtcacgcggaatttctcgcgcagcaggacggagttattcatcttctgcatgttttaccgggctctgccagcctgagcctgcatcgtttcgctgctgatgtgcgtcgttttgaagagcatttacagcatgaagccgagacacgcctgcaaaccatggtcgggcacttcagcatcgatccttcccgcatcaaaacccacgtccggttcggtagcgtgcgcgacgccgttaatgagctggcgggggaattaaatgccgacgtggtagtgattggttcacgtaacccttccatcaccactcacctgctggggtcgaacgcctccagcgtgatccgccacacccacattccggtgatggtcgtgagataaaaaaagaggccaccttttggtggcctctggcattgcaggtgtcgtcttgctttcttttattatgcggttttggtgcggatcagataatcaaacgagctcagcgacgctttcgcaccttcgccagtggcgatgatgatctgtttgtacggcacggtggtgcagtcgcccgccgcaaatacgcccttcacgctggtttcgcatttcgcatcaatgatgatctcgcccatgcggttgcgctcaatcgcgccttccagccaggtggtgtttggcagcaggccaatctgaacaaagatccctgccagcgccacgctgtggatatcgccactcacgcggtcacggtattccagaccggtcactttgctgccgtcgcctttcacttctgtcgtctgggcattgagcacaatatcgacgttattcaggctacgtactttatcctgcaacacctggtccgctttcatctcaggggcgaactccagcagggtaacgtgttcaacaattcccgccagatcgatagccgcttccacgccggagttaccgccgccgatcaccgcgacgcgtttacctttgaacagcgggccgtcacagtgcgggcaataggtcacgcctttggtgcgatactgatcttcgcccgggacgttcatgttgcgccatttcgcgccggtggcaatgatcacgctgcgcgccttcagcaccgcgccggacgctgtttcaatctggtgcaaaccaccctcgaccgccgccggaaccagtttgctggcgctctggctgtcaatgacatccacgtcgtagtcgctgacgtgcgctttcaacgccccggccagcttctggcctcggttttcggcacggaaatgtagttttcaatgtcaacggtatccagaacctgaccaccgaaacgctcccccatcagaccggtacggatccctttacgtgcggagtagaccgctgccgccgcgcccgccgggccggagccaacaatcagtacgtcgtacgcatcgcgttggttcaactcttccgccgcacgtttttctgcgccggtatccactttggcgacgatttcggtcaaggtcatacgcccctggccgaactcctgaccattcaggtaaaccgccggaacgcccatcacgttgcgctcggtgatttcgttctggaacgtaccgccgtcaatcgccgtgtgcttaatgcgtgggttgaggactgacatcaggttcagcgcctgcaccacgtccggacagttgtggcaggagagtgagtaataggtttcaaactcaaaatcaccgtcgatatcgcggatctgctccagcagcgcctgcgcttcttttgacggatgaccaccggtccacagcagcgccagcaccagggacgtaaattcgtgccccagcggagagcccgcgaaacgcggcccctggtcagaccctgggttggcgatcaggaaagaaggcttacggactgccagcgtgttgtcttctttgaaggtcaccttcggcgacagctcagcaatctctgtcagcagcgctttgatttctgccgatttcgcgctgtcgtccagcgtggcaatcagctcaacaggtttggtcagtttctcaaggtaggccttgagctgggttttcatgttagcgtcgagcattattcttccctctcttaaaacgtcatcatgcaagccgccttatacgggctgcctgaatgcaacttgcatcatggtgctggaatgaaatgggcgcggggagcgcccattgattgccgggtggcacttcgtttacccggcctacgatactgtaggcctgtgcaagcgtagcgccgccaggctttacagacttagatcttgccgaccaggtccagagatggcgccagcgtcgcttcgccttctttccatttcgccgggcacacttcgcctgggtgagaagcaacgtactgagccgctttcactttgcgcagcaggtcagatgcatcacggccgataccttcagcggtaacttcgatagcctggataatgccctgcgggtcaacaacgaaggtcgcgcggtctgccaggccttcatcttcacgcatgttgtcgaagttacgggtcagggcgccagtcgggtcgccgatcatcgcgtatttgattttcgcgatagtttcagagctgctgtgccacgctttgtgggtgaagtgggtatcggtagaaacagagtaaacgtctacgcccagcttttgcagttcttcgtagtggtctgccacgtcgcccagttcggtcgggcaaacgaaggtgaagtcagccggatagaagaagaacacgctccagcggccttcggtatctttctcagttacttcgatgaactcaccgtttttgaacgcctggtttttgaaaggtttaattttggtgttaatcaaggacatctgtacttcctccgtgttttcgttgagatgtaaggtaaccaactttgttcatcggggctaatgcgtatgctttatcaaatcaatcagccaaaccttacaacagcaacaagacagcaaggtgaaccttttacaggaaagcctgaaagtaaaaaggccgcctcaacgggcggccctgatacctgaattccccgcaggtacattcagtgccagccgaagctggcgttgcgttgcgctctacataccttgtatcaaggccgtaacagcggtttgattacagcatccgtgcgcgcattgagcaatgcataagagggatagtcctgcctatggttgtgataggcagaatcgaacaggcctcagaaacgttataaatttaatttcattataaatttcgcgctatatataaatgccagttgtcattcaaataattcaatcacactttaaagataaaattatcttaataaatcttgaagttgtgtttcaataatccaaagccgtgatatattaagatcacttaatttttaaattaagcgagttacccccacggattgttaaaggtaacttccctctgtcgtactccatgatgtgataacgacagcaaacacagcacactcaggacgaaacatggccaacctctacgacctaaaaaaattcgatctcaatctgttagtcatcttcgaatgcatttaccaacatctcagtatcagtaaggctgccgagacactttatatcacgccatccgccgtgagccagtcgctgcaacgtctgcgtggccagctcaatgaccccctgttcatccgctcaggtaagggaattactccgaccacggtgggcaccaacctgcatcatcatcttgaacagaatctcaaccaaattgagcagacgatcaacatgatgcatcactcggacatcaagaaaaagttcgttatctattgctctcaaatgatgtcgcccggctatatgctcgaaccaatgaagctgctaatgtcagaggaaaattacgagatagaacaacgagatatgcttatctctccggaatccgcagaggacctgctcgcctaccgtaaagctgacctgatctttactattgccccaattaagaatcgctctgtggtgtgttctcactttgccacggtgccaatagcgttaatctgccgagaaaaccatccaagactcgccgatacggtcagtcttgaagcgttataccgggaaaaattcaccttttaccagagtgcgcacccgggcgttaaagagttccagaatcgtgccaatgaccttttcccggaaagagatattgcttttcgcacggactccatcatttcgcttatctccatggtcagttcatctgatctgttaggctttatacccgtatcaatctatgaagcctataaagagacgttaaaaataaaacggatcgccgccccatttgaattgcccgaaatacatgtctatatgctttacagccgttcatcgctgaacagcagtgttttttcaacgttcattgagaaaatgcataaactctgtctttccgctccgtctgcgtaaaatcatttatatgatgaatataaaaatcgcaaactgaaaaaatgatcccgtgaaaataatgaaaaatgatttcataatatcgtcttaattttttccagacatttaacacgcaggatgcgattaaccatgtcgatctataaaatccctttacaggaaaatgttttagacgcttcagcggaacgcatagactggacgctaaacaatttctccagggtatgcgtttccttttccggtggaaaagattctaccgtgatgctgcatctcgttgcccagcaagcacggcaattaaagcgaaaaatagatgtcatctttctggactgggaagcgcaattctcctcaaccattcagcatgttgacacgatgagaacgctgtatcgggatgttatccatcagttctggtgggtagcgcttccgctcacgacccagaacgccctgtcacagtttcaacctgaatggcagtgctgggaacccgggacaaactgggttcgccagccaccggaagatgccattaccgattatcactatttcgatttttatcagcagggaatgacgtttgaagtcttcgtgcgagagtttgccgaatggtatgcgcaaaaacgtcctgccgccgtcatggtggggatccgcgccgatgaatcctacaaccgctttctggctatcgcgtcggcacgtaagcagcgcttttctgacgataagccctggacgaccgtcgcaccgggcgggcacacctggtatatctaccctctgtacgactggaaaaccgccgacatctggacgtggttcgcgaaatcgaaatgttgctataacccgttatacgacctgatgtacaaggcgggggtgccgccgcgttatatgcgcatctgcgaaccgtttggcccggaacagcgtcagggcttgtggctctatcatgtcattgaacccgaacgctgggcggcgatgtgtgagcgtgcctgcggggtgcgcagcggcggtatttatgccgggcacgataaccatttttatggccaccggaagatcctgaaaccagaccatcttggctggcgcgaatacgccatgctgctactcgacagcatgccgcaaaatacggcggaacattaccgcaataaaatcgcggtttatctccactggtatcaaaagcgaggcatgaacgatattcccgatacgcaggagggtgacattggtgcaaaagatatcccctcctggcgacgcatttgtaaggttttactcaacaatgactattggtgccgggcactttcgtttagcccaaataagcccaaacactatcagcgctacagcgacagagtgaaagcaaaacgcaaggaatgggggattttatgcaacaacgaataatcaccgaaatggaaacgtaccttcaggcactttctgaggaagagcgaatagccgctattaatgcgtttcgtcaggcattacatgaaatcagcccttttcgcgatcagcccgtcgattgcgtattgtggataaaaaagacaaacatcagcgctaacgattacaacccaaataacgtcgcgccaccggaaaagcggctgctcagcaagtcactggagctggatggattcacacagcctatcgtggtgacggaaaatgcgccacagcactacgaaattgtcgatggttttcaccgccatgatatcggcagtaaccgggcgcccctgaagcgccagcttaagggttaccttcctgtcacctgcctgcgtaaagcgcggcaggaaaagttcgaccgcatggcggcgaccattcgccacaaccgcgcgcgcggacgccaccagatcaacgccatgtcagaaatcgtgcgcgagctggtgcttatgggctggagtgagcagaaaattggccaggagttgggtatggacagcgatgaagtactgcgtctgaagcagatcaacggtctgctcgaactcttcgcagaccgtcgtttttctgaagcctggacggtgaaatagtcagagcgcgtttaaccgcgctgccgctgccagcagcgtcgattcctgcttcgcaaagcaaagtcggatcagcttatgcgggaagggatcggcgcagaacaccgacagcggaatggccgccacgcccacctctttcgtcagccactggcagaaactcacgtcgtccagatcggaaatcgcgctgtagtcggccagcaagaaataggtcccttcacagggtaaaatctccagacggcttttgctcaacgcagccacaaaccgatcccgacgcgcacggtagaaatccggtagctcacggtagtgtccgggttcgctgcgcagcatatccgccagcgccagctgagcgggtgtgttcaccgcaaacgtcagatactgatgcactttacgcagctcagcgctaatggcggcgggcgccacgcagtacccgaccttccagccggtcatatggtaggttttgccaaatgacgataccgcgattgcacgctcacgaagctgcggatgcgccagcacgctggcatgtccctcttcggcgaagcagatatgctcatacacctcgtcgctcagaacatagatttcacgttcggcgatggcctgccacagggcggcaaaatcgctcttctgccacaccgtcgccgatgggttgtgcggcgtattcaggatcaccagccgggttttatcgctcagcagcgcggcaaacgcctgccagtccggacgaaaatgcggcggctggagcgccacgcgtttcactacgccgccggccagttcaatcgccggggcgtagctatcgtagcttgggtcaaaacaaatcacctcatcgcccgtacgcaccagggcggttatcgccgcatacagcgcttcggtcgcccctgcggttaccgtgacatcgctgttcgcatcaggtttatagccatacagctcagccgttttatccgcaatggcttcacgcaacgcctgcacgccggtcatcggcgcgtactggttggctccctgcgccacgtggtacgccagacgctcctgcaaatatttcggcccgtcaaaatccgggaaaccttgtgagaggttaatggcgttgtgctgctgcgccagggcgctcatctgggtaaaaatcgtcgtgccgagatttggaagtttactctgcgggatcaacgggttattgctcattgtagtgtgcctgcctgtaatacttatgttgctgacactataacacgatgttagtctttggcaatcaagacgcttagacgtctaaacgatataaatattcctgaccgagagggtaaaaggaaatgacagacaacctgcaactcacacacctggtcgaggcctgccgctggattggcgccaaaggctgggcgcccgctaccggcggcaatatgtccgtgcgtcaggatgaacacctgtgctggctgagcgaatccggaaaagacaaaggcagcctgaccaccgccgattttctacaggttgaaatcgccaccaaccgtgcgccgtctggccgtaaaccgtcggcagagaccgggctgcataccctcatctatcgcctgtttcccgaggctaacgccgtcctgcacgttcacaccgtcaatgccacggtgctgtcgcgtctggtcaacgaggccgagctgaagatcaccggtttcgagatgcaaaaatcccttaccgggcagaccacgcaccaggatacggtggccatcccggtgtttgataacgaccaggacatcgacgccctcgcctcgcgcatcacccattacgcgcaggaacgcccgcttaattatggttttcttctgcgcggccatggcttaacctgctggggacgcgacgtggccgaagcccgccgtcatctggaagggttagaattcttatttgaatgcgaaatgcgtttacgacaatgggagagagtatgattcgcgcgattgtgacggatattgaagggaccaccagcgatatccgttttgtccatgatgttttgttcccctacgcgcgtgagcggctggcggccttcgtgaccgcgcagcagtacgccgagccggtcaaatcgattctggacaacctgcgcgatgaaatcagcgctccgcatgccagcgtcagcgatctcatcaacgtactgtttacatttatggatgaagaccgcaaatcgacggcgctcaaagccctgcaaggcatcatctggcaggacggttacgtcaacggtgactttaccggacatctctatcctgacgtactgcccgcgctggaaaaatggaaggcgcaagggattgatctttatgtttattcctctggctccgtcgccgcgcagaaactgttatttggctacagcgacgaaggtgatattactcacttattcagcggctattttgatacccacattggtgccaagcgcgaggtgcagtcttatcaaaatattgcggcgcaaacgggcatcgccccgtcgcagatcctgttcctgtcggatattcatcaggagctggacgcggctgaacaggcgggttttcgcaccctgcaactgattcgcggtgaagatgacggcgcaagccatcatcatcagatccaccagtttgacgagattaatccggagcagatcccttcatgagcgcattgaccatttattccgataaagacgccagtcagcatcagtggcacagcaccgacgccgccgagattgcccaacagctgaacgcgaaaggcgtgcgttttgaacgctgggcggcggatcgcgatttaggccacgatcctgcgcccgaagccgtgatcgaagcgtatcagcatgcgatcgacaagctggtggcagagaaaggttaccagagctgggacgtgattagcctgcgcgccgacaatccgcagaaagaggcgctgcgcgcgaagtttctgaacgaacacacccacggcgaagacgaagtgcgctttttcgtggaaggtgccgggctgttctgcctgcatattggcgatgaggtgtatcaggtgctgtgcgagaaaaacgacctgatttcagtccctgcgggcacgccgcactggtttgatatgggctcagagccgaactttacggcgatccgtattttcgataacccggagggttgggtggcgcagtttacgggtgatgcgattgcggatgcgtatccaaggctggcataggtatttacatttctagtgccattaacgttaatcaatggcacttttaacgaatcaaaatggaatatcatctataaaagctatttttttattcactttcatgttaaaaacgtcttcaatataaattcgaagttgctcttttattttttcgctaccctccaacagctcgttaagctgcgaactcttagtagttatctcaactattagcgaatcatcagaaggccagatgtcatctatgctaaaacgatcatatactttaaaacccctcattacttcgagcgataactttgccccatacttatgccatagttcttttgttaaaatcttacgtttatcaatattagaaaaagcatcattgtaaaaattcgaaaagcatttattgatataagttacataatattcgtgaagtttttgataataaatttcattagttaaaaaaccattaagtgtcatgaaatttatttttgaagcagtcgattcaccatttataatataattacttatgatagtatgcgattccgtttcgcttggatgtatttcatctccttcacaatccagtagtatcatctcactatcaattaatgacattagatggaaaaaataaacactacgttctttttttcttgatgataaagaggttaactcataagactgcgctttcatcaatgacgttatcgaattgaatatatttttatcattatttgatcttccacttttcttactcatttcttgaaaagcaaaaacattttttgttacgttgaaaattttttcataaacaataccatccggcacgccgattttctctttgttattaaaattcaattcatagtttagtactgggtgattactccagtttttcaatggctcataatctatattaggatcattgggcttaatgtttttcactaataacgcccaaacattttcttcatttttcttacaactaattatgagagttgtataaactaatacatctctaacttttgtcgctttgtaagcaataatatctatttctcgcgcaacactttgaacatcatctatataatatttattattaataaccccccaaccatgattatttaaaaaatcagaaactttactttctaaaataaatccagtacttttaatattatcagcataaatttgtaatttatcattcattttagccccttgagcacgatgttttatcatttaccatataattaactttgctattttcttatctatattatttcattcaaaatcaacgatatattcacatcaaccaacctcgccagatgcacaaactccaccacatctaacctgcgttcaccactttccactttagcgataaacgattggggtttccctaaagcctccgcaagctgggcctgagtaatccccttctctttacgagctttcttcaacgcattgataacacgctggtattcatccgagtaaactgaggccattgttccgattccatacaaatatcctgaaatcgaatatcctcccgttgtgtttttatcccaaaacaggataattgagtgcgtaacaaacacacctaaggaggacaaaatgcgtcagcagaactggcactcagccgatattatcgccgcactaaagaaacatggaacaagcctcgcagccttgtctcgaaaggctgggctttcatcatccacactggcaaatgcgcttacccgaccatggcctaaaggtgaattgcttatcgctcaggcgctagacattccgcctgatgtgatatggccggaaagatattttgatgaaaagggagcgccagtatttcgtcagatgaggaatacaaaaaagagaaatctgtcttcaacatgatcaacgccttctccccctcaccccaaccctctccctcaagggagagggggttgaagagacttcacataccccaccagctgatccagcaccacgccccacccctcgtggaagcccatttgctcatgctgctcacggatttccttcgtcggatgacgcgcaatcgccgtgtagcgggttttgccctccccaacgtcctccagcagcaggatcgccgtcataaacggcttttcggcaggcttccagccctcggtataaccgtcggtaaagaccagcttgttccccgggtcgatttcaagaaacacgccccggttatccatccgctgcccatccacctcaaatatggtattgaaccgcccacccacgcgcagatcgaggtcgcagtcgatcaccttatgcggtgcagggatgaagaagtttttgatgtggtccggcgtggtccagcagagccacagcaggtcgcgcggtgcatccaccacgcgctccagttttaagtctgtgtcaggatcgagcgtcacgatgttgtcctctcagggaacccccttaaaggatagccggactcaggcaaatttccctttcgctacctcgtccggtgtgaccacgcctgtatccagcacccagccgctaatcagcgaggcgggggtgacgtcaaacgccgggttatagacctgcgcctcttgcggcgcccactgcaccgcgccaaagctccccgccacgcccgtcacttcactggccgcgcgctgcnnnnnnnnnnnnnnnnnnnnnnnnnnnnnnnnnnnnnnnnnnnnnnnnnnnnnnnnnnnnnnnnnnnnnnnnnnnnnnnnnnnnnnnnnnnnnnnnnnnnnnnnnnnnnnnnnnnnnnnnnnnnnnnnnnnnnnnnnnnnnnnnnnnnnnnnnnnnnnnnnnnnnnnnnnnnnnnnnnnnnnnnnnnnnnnnnnnnnnnnnnnnnnnnnnnnnnnnnnnnnnnnnnnnnnnnnnnnnnnnnnnnnnnnnnnnnnnnnnnnnnnnnnnnnnnnnnnnnnnnnnnnnnnnnnnnnnnnnnnnnnnnnnnnnnnnnnnnnnnnnnnnnnnnnnnnnnnnnnnnnnnnnnnnnnnnnnnnnnnnnnnnnnnnnnnnnnnnnnnnnnnnnnnnnnnnnnnnnnnnnnnnnnnnnnnnnnnnnnnnnnnnnnnnnnnnnnnnnnnnnnnnnnnnnnnnnnnnnnnnnnnnnnnnnnnnnnnnnnnnnnnnnnnnnnnnnnnnnnnnnnnnnnnnnnnnnnnnnnnnnnnnnnnnnnnnnnnnnnnnnnnnnnnnnnnnnnnnnnnnnnnnnnnnnnnnnnnnnnnnnnnnnnnnnnnnnnnnnnnnnnnnnnnnnnnnnnnnnnnnnnnnnnnnnnnnnnnnnnnnnnnnnnnnnnnnnnnnnnnnnnnnnnnnnnnnnnnnnnnnnnnnnnnnnnnnnnnnnnnnnnnnnnnnnnnnnnnnnnnnnnnnnnnnnnnnnnnnnnnnnnnnnnnnnnnnnnnnnnnnnnnnnnnnnnnnnnnnnnnnnnnnnnnnnnnnnnnnnnnnnnnnnnnnnnnnnnnnnnnnnnnnnnnnnnnnnnnnnnnnnnnnnnnnnnnnnnnnnnnnnnnnnnnnnnnnnnnnnnnnnnnnnnnnnnnnnnnnnnnnnnnnnnnnnnnnnnnnnnnnnnnnnnnnnnnnnnnnnnnnnnnnnnnnnnnnnnnnnnnnnnnnnnnnnnnnnnnnnnnnnnnnnnnnnnnnnnnnnnnnnnnnnnnnnnnnnnnnnnnnnnnnnnnnnnnnnnnnnnnnnnnnnnnnnnnnnnnnnnnnnnnnnnnnnnnnnnnnnnnnnnnnnnnnnnnnnnnnnnnnnnnnnnnnnnnnnnnnnnnnnnnnnnnnnnnnnnnnnnnnnnnnnnnnnnnnnnnnnnnnnnnnnnnnnnnnnnnnnnnnnnnnnnnnnnnnnnnnnnnnnnnnnnnnnnnnnnnnnnnnnnnnnnnnnnnnnnnnnnnnnnnnnnnnnnnnnnnnnnnnnnnnnnnnnnnnnnnnnnnnnnnnnnnnnnnnnntgcacggagacattcacagcggttcgatttttgtggccgacggcagcctgaaggccatcgacgctgagttcggctattttgggccgattggctttgacgttggcaccgccatcggcaacctgctgctgaacttctgcggcctgcctgggcacctcggcattcgcgatgccgccgccgcgcgcgagcagcgcctgaccgatattcaggaactgtggaacaccttcgcggagcgcttccaggcgctggcaaacgagaaagcccgcgacgccgcactcagcgcgccgggctatgcctccgcgttcctgaaaaaggtctggcatgacgccatcgggttttgcggcaccgagttgattcgccgcagcgtcgggctttcacacgtggcggatatcgataccatccaggatgaagccatgcgccacgaatgcctccgccatgcaatatccctcggtaaagcgctgattgtcattgccgaccgcatcgacagcgcggaagagctggtggcacgggtgcggcagtacagctgattttctccctctccctgtgggagagggccggggtgagggcatcaaaccgcactcaccccagatactcaatcaccgacatcccgccgttatagtccgtgctgtaaataatcccctgcgcatccacaaacacgtcgcacgactggatcacctgcgggcggttgggccgcgtatccatcatcctctccggcgccgcgggcaccagcgctcccgtttctaccgggcgatacggattggaaatgtcatacgcgcgcacgcccgcgttctgatacgtcgcaaaaattagcgttgagctgacgaagctccccggccggttttcgtgcaggttgtgcgggccgaaatgcgcccctttcgccacgtagtcagtttcatccggctgcgggaaggtggcaatacttaccggattcgacggctcgcggatatcaaacagccagatcagcttttcgccgtcctgctggttatccagcaccgcctcgtccagtaccaccagcaggtcgcgatccggcagcggcagcgcggtgtgcgtcccaccgccaaacggcgggctccagttacggtggctaatgagcttaggccgggtgcggtccttcacgtccagcagcgtcaggccgccgtcacgccagctgccatacgcggtgtcgccggcaataatcgcatggtgcagcgcgtagcgtttgccttccggccagcccggcttctcaccttcggcctggttcatcccgggcagccaccagcgccccgcgacttcaggcttacgcgggtccgcaagatcgatgatcagaaagatgtaatcggtaaagccgtcgatcagcgctgaaacgtaggcccagcggccgccgacgtaccagatgcggtgaatgccgatgccactcagcgacagaaagccgatttcgcgtggcctgtccggcgtggagatatcaaagacgcgaagcccggcgctccagactttatcctgcacgtcgctgacggtctcccccacctggcgggtgtagtagaccttctcatcggcaaaacgcgcatcggcaaacagatcccgggcgttgatcaccagcagcaaatcgtcgtgcgcctggaggtgtacgttccaggtacccggcggcgcgggcacgtaacctgcggcttttggttttttcggatcgcgcacgtcaacaatggaaaagccctgcgacaccatatgaccgatataggcgaaaccacggtgcaccatcagctgtacaccgtccggacgaccgccctggtcgctatggccaatcagccgcatattgcggctgtattcgggagggggtaattgagacaccttatgctccttacgcccggtggcgctacgcttaccgggcctacgggtgcgaaatgtaggccgggtaaggcgcagccgccacccggcttggtttacttgtttttagcggcaagcgtcgcaaaccacggcgcgataaaatcttccgtctggccccagcccggaatgattttccccagagacgccacgttcaccgcacccggctgggcggtcagcagcgcctgcggaatagccgccgccttgaaatcgtaggtggcaggcgtcgcttctccggcaatcttattggcgatcaggcgtacgttggtcgcgccaatcagcttcggatctaccgccacgctcaccttccacgggctacccggctcgcgcatcagttggagatcctggttggagatgtcgatgctgtagagcttgatctcggtgcggccgttctctttcagcgccttatacgcgccctgactgaaggcatcccaggtcccccagatggcgtcgattttacctttcgggtatttcgcgaggatcgcccccaccttgttggcggtgtcgccctgcacgtcagaggagaccgcgccgatggactccagctctttaatctccggatactgcttttgcagttctttatacgccgcctgacggcgctccatcggcgggaagcccgcgacccacagcttgacgatattggccttgccgttgaaatctttcgccagttgaccaaaagagaggttggtcagggaggcatcgtcctgctgggtaacggttacgcccgggatctcgccgttcacggcggtatcaaacaccgaaactttaatcccggcatccaccgccttctttaccagcgcggtggagtacggatcgcgcccctgagagagaataatcccgtcgtatttctggctgatggcctggttcacgaaatcctggaatctggcgtcgtccccgttacttaaaaacgtgctgaccttaaagccgagctttttcccttcctgaatcgccccggcaacaaactgcgtggtgttgtcgtccgagcccaggttgcggatcaccgcaatgcgaatggggccgtcatggctggcaatggcggccggaaccggcgcgggggtagccgccaggcccggcaaagaagtgagtaatccaagagctaccaaagagagcgcaatctttttcatttattatcccgttgtgttgtcagcgtttttgtatgtaagtaatcgccagtgccaccgcgagcaccagcccttttataatgtccatggcgtaatacggcacggagagcatcaccagcccgttcgacagcacgccgaggatcaccgcccccaccagcgtgcccagcgcgttcggcttgccggacccggccagcgagaacccgatccacgccgccgccaccgcatccatcaggtagccgccccccgcattcacctgcgatgaaccgatacgcgaagccagcaaaattccgcccaatcccgccagcagcgaggcgatcacgtaggccgccaccttgtagcgcgtggtgcgaataccggagagacgcgcggcttccgggttgccgccaatggcgtacatccggcgtccgtgggtggtcagcgacaggcccaactgcgccagaatcgtcaccaccagcatgacgatcacaatggtcggcacctgccccagcaggctgaacgccgccggaatggtcccttccgccatgtcgccgctcggcagcaccatgttctcggtaatcgacccgccgtagctgtaggtcatcgccacgccctggatgacaaacaggctggcaagggtcgcgagcatgtccggaatgcgcaggatgacgatcagaaaggcgttaaacaggccgaccagcgtgcagagcgcaagggtcagcagaatcgactcggtggtgccgaagccgtgccagacgaaaagcgaaatcaccagcgcgttcgccagcgacgcggttgaccccaccgagagatcgaacccgccgacggtcagcgaaatcgagacgccgatggcaatcactgtcacgatggcaatcgagcgcagaatgttgatgatgttgttcggatcgaggaagctgtccgacgccaggccaaacaccgccaccagcgcgacgacggtcagcagcatgccccacctgtagagaaaatcgaaaatctgctgacggccagacgccgccgcattcactgaaagggccttgctcacgacgccgttcctccggttgaataataaagtagtgtctcttcccgggcctcggctccggcgatttccgccacgatgcgtccgtcccacagcacgcagatgcggtcgcacagcccgaccagttcggcaaactcgcccgaggcgtaaatcacccctttgccctcgcgcgccaggccgtcgatcagctgaaacagatcggttttggccttcacgtccacgcctttggtcggctcgtcgaatatcagcacgctggcgtcattgcgcagccatttgccgatggcgaccttctgctggttaccgccggaaagccgacgcagcacctgccccggcccgcgcgtgcgcacaccgacgcgggcaatcacctcttctgcccagcgccacgcctgacgatgaccaaacaggctccagcgcgagaagctgttatcggcgcacacggcaaggttcatgctcaccggctcgtcgataaaaatgccctctttgcgccgctcctccggcaccagcgccagaccgcgcagtaccgagtctgccggatcgcgcggtttccaggcctgatggttcagctcgccgcgcgcgacgcggcttttgctggcgccaaacagcgccttgcagagttccgttttccccgcccccgccagcccggcaatgccaaggatttcacctttgcgcaggtgcagggagatatctttcagcagcgcatcgtcgtgtagcccttccacccgcagcagcgtctcctcaccgtgcggcgggcgcgggggcggatagatatcgctcagctcgtggccgagcatcttctcaacaatcgcttcgccgctcagatccgccatcgggccggactcaatcagcctgccgtcgcgcagcaccgtcagggtgtcgcagatggccttcagctcgtgaatgcggtgagagataaacaccacgccgataccctgctgttgcagacgtcttactaccgcaaacagacgctcactctcgtgcgcgtccagcggcgcggtgggctcatcaaggatgagaaaacggcagtggtgcgacagcgcccgcgccagcaaaatctgctgtttttcagccagcgtgcaactgtcgatggagcggcgtacgtcgagcgaaacatccagctgcgccagcgcctgccgcgcctgctggcggatgtcgcgccagctgtagcgatgccccggatgcgccagctggtcgagcatgatgttttcggcaatgcttaacccgggaatgagcgcaacatccacctcctgctgcacaaggtggatacccagccgtttggcgtccagcggctcgcggatacttaccggctggttgttaatgcaaatttcgccttcataacgatcgtgcgtcccgcacagcaccgccatcagcgtcgatttccccgcgccgttggcgccggtcagcgcatgcaccgacccgccgttcagggtgaaatccacgcgcgacagggcctgaaagccggaaaaggccaggctgataccgcgcatctcaaggcgactggaaaccatccgcgtaaatccttcattactcttctgatttagcgaatttttcacagctcttgttgactgacaacgacgtaaaaggcataagttaaagcaaaatattattagccatccggatgtccagacataacatcgggttagcgcttgctaaaaaaggacaacttcatgagcaacaccgatatccgcgtcgtgcccggcccggcgaactacttctctcatccgggaagccttgcccacctggatgatttctttactccggaacagctttcccgcgcggtgtggatctacggcgagcgggcaatcgagggcgcacgcccttatctgccgcagagttttaacgcgacgggggcaaaacatctgctgtttaagggccattgcagcgagagtgacgtcacccatctggtgaacgagtcgggtagtgaaaccagcgtggtgattggcgtgggcggcggtgcggtaatggataccgtcaaggccgtggcgcgtcgtctgggcgtgccgttcgtaggcattcccactatcgccgccacctgcgcggcgtggaccccgctctccgtctggtacaacgatgccggtcaggcgctacagtttgagatttttgacgacgccaactttctggtgctggtggagccgcagatcatccttaacgccccggcggaatatctgctggcgggcatcggcgatacgctggcgaagtggtacgaagcggcggtgctcgcccctcaacctgagagtctgccgctgaccgtgcgtcttggcctgaacggtgcgctggcgatccgtgacgtgctgctggcacgcagcgaagaagcgcttgcggatcagcagcgcggcgaacagacgcaggcgttccgggacgtggtggatgcgattattgccggaggcggaatggtcggcggtctgggtgagcgctatacccgcgtggcggcggcgcacgcggtgcacaacggcttaaccgtgctgccgcagacggaaaaatacctgcacggcaccaaggtggcctacggcattctggtgcagagcgccctgctcggtcaggacgacgtgctggcgcagctggtggcggcgtaccagcgcttcaatctgccgaccacgcttcgcgagctggacgtcgatattcacaaccgcgacgagctggataaggtcattgcccacaccctgcgcccggtggagtcgattcactatctgccggtgacgttaacgcctgaggtgctgcgcgccgcgtttgagaaggtggaatccttcagccgttaatcgcgccgacgggctatacctaatgatgattctctccactcttgcaacgaggtcatcatgcagatcgatttaacaggtaaaaaggcgctggttactggcgccagtcgtgggctgggtcgggcgattgcgctgtcgctggcacgcgccggtgccgatgtggttatcacctacgaaaaatccgtcgataaagcccagcaggttgtcgatgagatcaacgcgctggggcgacacggcgaggcgattcaggccgacagcgccagcgcgcaggcgattcaggatgcggtcacgcaggcggcgcgctccctcggcgggctggatattctggtcaataacgccgggattgcgcgcggcggcccgctggagtccatgaccctggcggacatcgacgctctgatcaacgtcaacatccgcggcgtggtgatcgccattcaggaagcgctggtgcatatgtctgacggcggacgcatcatcaacatcggtagctgtctggcgaaccgcgtggcacagccggggatcgccgtctactcgatgaccaagtctgcccttaactccctcacccgannnnnnnnnnnnnnnnnnnnnnnnnnnnnnnnnnnnnnnnnnnnnnnnnnnnnnnnnnnnnnnnnnnnnnnnnnnnnnnnnnnnnnnnnnnnnnnnnnnnnnnnnnnnnnnnnnnnnnnnnnnnnnnnnnnnnnnnnnnnnnnnnnnnnnnnnnnnnnnnnnnnnnnnnnnnnnnnnnnnnnnnnnnnnnnnnnnnnnnnnnnnnnnnnnnnnnnnnnnnnnnnnnnnnnnnnnnnnnnnnggcattaccgtcaacctggtccaccccggcccgaccaacagcgatatgaacccggaagacggcgagcaggctgactctcagcgtcagcttattgccctgggccattacggccagccggaggatatcgcagcggcggtcaccttcctcgccagcccggctgcgaggcaaatttccggcaccggtctggatgtcgacggcggtctgaacgcctgatcgcaaatttactgtatgcctctgtcgtcaggcagaggcctgttcgagccgcctcgacgattcgcggtttgccgctttctcgcggtttttctccgctctacagtacccataagaaattcggaatttatctaatagtcttattatttccttatattttgtgtgggcgtacagtggaggtacggatgaagattgtctggtcaaagaccgctgagaagcaattttctaaaatcgatacgcgatatcagaaccgcattaaattcaggctggagaagatggatgataaaacatcacctgtcgcggatatcaagaaattatcatctcccgaaaaccactacaggctgcgattaggtgattacagggtaatttacaccttcggggatccgccgggtgatatctgctacgtagtggcggttaaacgccggacaacaaccacctaccttcatgaggagcatacggaatatgactgttcagttcataaaggataaagaagggaaaaaacagtatgttgtcattccttatagtgaatattttcgcatgcgtttagccacgcttgagtatgacgatgaggatgaaagcgactgggaagacatcccttatgaatcagatatctacgataacgtaggtttaccgggggaagtgtgcgacgtcatgcataacgagaacgtcagcctacaggccgcctggcgcattttacgcggcatgtcccagcaggaggtggcggagaagcttggcatcagccagtccgccgtgtcacagctggaagcgctggactcccgaccgcaaaagcgcacccgcgaaaagctggcggcaatttacggctgtaaacaggagcagatcagcctctatttaccaaaagagggttaacagcacttcgccccgcccttgccgccgtagcgggcgtcctgacggtcgcggaaaaattcttcgtaggtcatgggcgtctggtccgggtggttgacgcgcatatgctcgacgtagttgtcgtaatccggcacgccaatcatcattttagcggcctggcccaggtatttacctgctttggaaagggtgtcgaacatagttctgatctcacaggaaatgtaggccgggtaaggcgaagccgccacccggcacacgggttaatgcgcccctttcgcctgggtgacaatctcgtccaggttctcaggcattggctcgtacggcgtctctttcgccgtcggtttgtcgactttcaacgccgccagcgcggttttcagagaatacaacgccagcaccacaaccaccaccataaagaagatggtcagcccggcgtccagacggttgttaaacaccagctgcgacagctgcgactcggtgtactgtgccgggatcttgccgctgtcgatcatcgcctggaacttgttggcgatcgccaggaagcccaccttgttgtccgggctgaaggctttctgccagcccgcggtcagggtacagatcagcagccacgccgttggcaccagcgccacccatgcgtaacgctggcgcttcatcttgaacaggactacggcacagagcatcagggccatgcccgccagcatctggttggcgataccgaacagcggccacagggtgttaatcccgcccagcggatcgaccacgccctgatgcaggaagtagccccacgccagcacgcacagcgccgtcgccagcaggttagccgggagtgaatcggtacgcttcaggttcggggagatcacccccagcagatcctgcaacataaagcgcgccgcacgcgtaccggcatccaccgccgtcagaataaacagcgcctcgaacagaatggcgaagtgataccagaacgagacatccatcagcccgcccagcgcgccgtgcagaatgtaggccatgcccaccgccagcgttggtgccccgcctgcacgagagataatcgactgctcgccgacctcattagcgatatgcgtcaacgtttcaggggtaatcgcaaagccccagccgctgaccacctgcgcggcagaggcaaccacgtcaacggtgccggcaggtgccagtaccgccattgggctgttcatcgcaaagtaaacgcccgggtcaataatacaggccgaaaccagcgccataatcgccacgaaggattccatcagcatgccgccgtagccaatcaggcaggcctgattttcattcgccagcatcttcggcgtggtcccggaggcaatcagcgcgtggaagcccgacaccgccccacaggcgatggtgataaacaggaacgggaacaggttaccggtccagaccgggccggtgccgtcaataaatttggtcagcgcaggcatggtcagggtcgggcgcataatcagaatgccgatcgccagcccgacgatggtgccgattttcaggaaggtggagaggtagtcacgcggggccagcagcagccataccggcagcaccgccgccacgaagccatagcccaccagcatccaggtcagttgcacgccggtgaagtcgaagaacggcgcccaggtcgggctttccgctacccagccgccggagataatggcaaacaccaggaacaccaggccaataactgaaacttcaccaatgcgccccggacgcagatagcggatatagatccccataaacagcgccagcggaatggtgaaggcgacggtataggttccccacgggctgtgggtcaaggctttcaccacgatcatcgccagcaccgcgaggatgatcaccatgatcataaaggtcgccaccagcgcaatcaccccggcggttgcgcccatctcctctttcaccagctcacccagtgaacgaccgtcgcggcgggtggagacgaacagcaccatgaagtcctgcaccgcgcccgccagcaccacccccgcgaggatccagatcatccctggcaggtagcccatctgcgcggccagtaccggccccaccagcgggcctgccccggcaatcgccgcgaaatggtgaccgaacagcacttttttatcggtcggcacgtagtccagaccgtcgttatgacgcacggccggcgtcatgcgcgtgccgtctacgcccagtaccgtcttagcgatatagcggccataaaaacggtatgcgatcagataaatgcagacggaggcgacgacgatccacagcgcgttgatctgctccccccggttgagggcgatatagcccagggcaaaggctcccaccacggagagcaccgcccacgtaaggtatttccctgagttgttcatagttgttgtccgttgttgtgaaacagtgagatgttacattttgtttctagaacaacggataaaatttaacaactttgaaacgcaataatgcgtggtcaaaccagagatttacaccacagtgttaagccgatcactttcagctgaatgacttaccccaacaccatcgtactcaaccgacaggtacagcaccgccgcccctgctcgtcgaacaccacaatctcccagctctggctggaacggcccagatgcagcggctgacacacgccgcgtaccttaccgtgagagaccgcgcggtggtgcgtggcattcagttccgtgcccaccacgttctgcccgtcacgggtcatcagaaaaccggccattgagcccagcgtttccgccagcgccgccgaggcgccgccatgcagcaggccaaacggctggtgggtgcgggcatccaccggcatctccgcttccagcgtatcgtccccgaggcgggtatagacgatgccaaggtgccccaccatcgtattcaggctggtggcgttcagctcctcgagcgttaaatgacgtttccagatcattacgcccccagcgtggagccgccgtccaccacgatatcctgcaaggtgatatggctggcggcatcggatgccaggaacagcacggtcgcagcaatctcctgtggacgggcaattttaccgagcggaatgccgagcttgaactgctcgccaaagccgcgaatgcgccgctgttccgcatcatcgctggtccacagggtgcgctgcatgtcggtatccgttgaacccggcgacaccaggttacagcgtacgccgctgcccgccagctccagcccgacggtcagcgccaggcttttcagcgccgctttcgacgcgccgtaggcgctcatgccgatgcgcggcgtgtgcgccgcgtcagaggccaccgtcacaatcgcccccccctgctgatgacggaactggcccatcgtctgctggaacaggttgaacgcgccgccgacgttgaccgcaaaggtctgctgccagtcctcctgcgagagctgatccgtcgcgcccatacgcagaatgcccgccgcgttaaccagcacatcgagccgctcaaggctgctgagcaaacgcccgcagacgtcactcgcctgcgccgcatccgccacgtccagcgtttcggtggcaaacggatattcgccgtgagggaaagccagatcgaacccggtcacctgcgccccggcctccacaaatgccagcgcggtcgcataaccaatgcccttacccgcgcccgtcacccagaccgttttaccggtgaaatcaaaagccatcacttcacctcgcgggagagcagcgcccaccaggcatcgagggtcggattttttgccagcatcacgaaatcaatgtcgccgtgcactttgcgccagcgggcggccagcgccatcatcctcactgaatccagaccgtagtcgatcaggttttcgtcatccatcggctcgtcggactcgtccagcagcggcaggatcagctcacgcagcgcggctttcgttgtcggaacggacggcagcagttcgtcggtcatcaccacgcggcccgaacgtcctgccacgtatttcagcgacatcaggtgctcgtcgcgggtgaaatccgccagcgcgtcggcgataaagaacggtttgatgtcgcgcataaaggcgtcggtggcggtggtcatgcagccgatgtgggcgtacacgccggtgatcaaaagctggttgcgcccggtctctttcagcatctgctccagcggcgagcggtgaaacgcgctgtagcgccacttcaccagcacggtgtccgcttcgtccggggtcagctcagcgacgatgcgctgctgctccggcgagcgagtcaggcccggcccccacatatcgttcagcagggcgcggtcttcgtcgctctgatctttcggctgcgcggtgtagtacaccggaatattgtgctctttgcagtacgcgcgcagtttagcgatgttcgccactacctgctgcatcatgtcgctattttcgccccagaagttcaggaagtactcctgcatatcgtggatcagcagcgcggcgcgctccggttcaaacgcccagttcactttactggtcggcagttcggcggcggttggcagcgcgtatgcggttaattttggaatggccattatctgttcctcagccccgggcgcgttcagcaagccacaggcgcaactgtttcttatcaactttgccgaccggcgtgagcggaagcgcatccacgctctccacgcggtccggcagcttaaattcggcgacgccctgctcgcgcaggaagcggcgcacctccaccgcgcgcaggggctgtttcaccaccaggtacgcgcagcttttttcgcccagcaggctgtcctccatgctcaccagcgcggcgtggatcaccgcgtcgtggcgcagcagcaggttttcgatctcttcggcggcgatcttctcgccaccgcggttgatctgatctttctcgcgcccctgcacggtgatgtaaccctgctcatcgatggcgatcagatcgcccgagcagtagaaaccgttggcatcaaaggcgctggcgttgtgttccgggctattgaaatagccgcggaaggtgtaagggccgcgcgtcatcagacgcccgacttccccgcgcggcagcgggttgccgtcctcgtccgccacccacacttcatcgtccgggcacatcgggcggccctgggtattgatgatgcgctccggcgcatcgtcgagggcggtgtagttcaccagcccttccgccatgccaaacacctgctgaagctggcagccaatttccgccggaatacgtgccgcaagcgtggcggagagacgtgcgccgcctacctggagcagttcgagggatttcagctgggcgttccccgcgccgtcggcaatcgcctgcaaccacaggctgaccgcgggcggcaccagtgaggtgacgtttatctgatgctgctcaatcagcgggaagcagagcgtggcgctcggatcgttcgccagcaccacgcagccgcccgccgtgaaaacgcctaacgatcccggcgagctcatggcgtagttatgcgccgcgggaagtgcgttcagatagcgggtgtgcgcagtgattccgcagatttcgttgctgcgacggatgctgtagtcgtagtcgttgtgcgtacgcgggatcagcttcggcgtgccggtgctgccgccggagagctggaagaacgccacttcgtcggcgggcgtcgggttcgggatgaaattgtccgccgggcgtgcaatcgccgcctccagcgcgtgttcgcccttatcgccgcgtagcagcacaacgcgtaccgagcgatgcgcatccacaaaggtattgagaaaatcatcacccgcgaacagcgtgtggtcgcggtcggcaatcagcacggcgggtttgatctgctccgcgtaggcgttgagttcgctgcgctgatggctaaagagcgcgttgaccggcgcgacgccgatttgcagcagcgcgaagaaggtgatgtagaactcggccacgttgccgagctgcaccagcgcggtctcgccgcgatgcagcccctgcgcctgaaggacagacgccagattcgtcaccgcctgattaaacgcgcggtaggtgatgcggcgatcgccgtcaattattgcgaccgcatcgctgtccgcatggtccgtcaggatgtgggtcagcggcagatcctgccagtagcctttttcacggtagcggcgggcaaactcctcaggccagcgggtaaaagggatggtcatgagtattccttagtgcaaaccaaacacgttgagcatggtggagagcttcacgcccgtctcgcgccactcgcctaccggggaggaagcaggcacaatgcccgcgccggcaaacaggcgaacggtattttgatgcagtcgcgcgcagcggatagttaccacccactcgccgttcccttcgctgtcgcaccagccgacgatgccgccgaacagctcacggtcgaacggctccagctcggcaattagctcttttgccgcctgatgcgggaagccgctcagcgctggcgtcgggtgcagcaggcaggccagcgtcagggcgttttcgttttcacgcgcgtcaccttctaccggcgtcgccagatgccacagcgttggggtggtaatgagctgcggggaagccggcatgctcagatgatggctgcgcggttccagaatggttttcatcgcctgggttaccaggtcgtgctcgtgacggtctttttcggaggccagcagcttagtgcccgcttcgcgatccagcacatcgtccggctgacggcgcgcagagcccgccagcggcagcgagctaaagtgcgcgccctctttacgcagcagcagttccgggctggcgcccagcagcacgccgccgtcttccagcggtacgtggaagttaaagctcgccgggttctgggcgataagacgctccatcagcgcgctgctatcaatctgtttgtcggtggcgatatcaatcaggcgcgacagcaccaccttattcacctgcggcgtggcggtgagcgacgcggcgcgagcgaccatctcctcgaaaaccggctgcggcgggatctcggtgcgttgttgcacattcagcgtctgcgcgccggaggcgtagcgtgcggactgctgacgcgccgggcgggagaaggtttgccagcgttgcggaataaacagcgatgacggtttgcgggtatcgaaggggatcgcccctaccatcaccggatgggcaatgccgctgtttttcgcattctggaaagcctgagctaatttctgctgaaaggggcccgccggatcgtcaccgccgacggcgggttcagaaaaacgggcaaaacagcctgacgtggtaaaactgcgatagggcgacataaagaaaaagctgtctgattgcagcgtggtcgcggtgtgctgaaggtcctcagccaatgacgtatccatatcatcctcctaaaatgataaaagcagtaataatgattatcatttatattttcgtcggctaacctaatcccacatcgccctggtgtcaaccgcagagcaaacaacttgtgcgactaacgcttgcataccttccccgcaatcatgaaaatgagaagcattaacttcaacaaaaacaggatgccgctctgtgaaactccctgccgtttgccgtaatgcctttcttttaacaggactttttgttttaggactaacctcagctacggccgccgactggccgcgtcaggtcacagacagccgcggcgtacatacgcttgagagcaaaccgacgcgcattgtctccaccagcgtgaccctaaccggctccctgctggccattgacgccccggttattgccagcggagccaccacgccaaacaaccgcgtggcggatgcacagggctttttacgtcagtggggcgatatcgcgaaacagcgtaaggttgcccggctgtacatcggcgagccgagcgccgaagcggtcgcggcccagatgccggacctgattttgatcagcgccaccggcggggattccgcgctggcgctctacgatcagctttccgccatcgccccgacgcttatcattaactacgacgacaaaagctggcaggaactgctgacccagctggggacgatcaccgggcaggaaacacaggccgcagagcgcatcgctgccttcgataaacagctcgcccaggtgaagcagcagatgaagctgccgccgcagccggtgaacgccatcgtctacaccgccgcggcgcacacggcgaacctgtggacgacagactcggctcagggcaagctgctgcaccagctgggcttcacgctggcggcgttacctgatggattgcacacctcgcaaagccagggcaagcgtcacgacattattcagctgggcggggaaaacctggcgacggggctgaacggcgaagggctgttcgtgtttgccggcgaccagaaagacgtggacgcgatttacgccaatccgctgctggcgcatctgccgtcggtcaagaacaagcgcgtctgggcgctgggaacggagacgttccgcctggattattacagcgcgttgttggtgttgcagcgtttgaattcaatttttaaataagtggcacgtttcccgtaggcccggtaagcgcagcgccaccgggctttttgtcgggtggcggctacgccttacccgacctacaggttctgcctgaaccgacgcaactccaccaaaaccgccaataaaattacgccaaccacggctaacacaaacccgctgctgctcgccgacgccaccggggtcattatcgcccccagcccgccgaggatcgctgcgccaatcgcatcgcccgtgacgttctgcgccgtccacaggccgttaatgcgcccgagcatcccttccggcgtctgggtctggatcagggtgtactgtaaaagagagctgaccgcgctcagccagccaaaaatcaccagacacatcacccccagcgcccacaccggcatcaggctgaagaaaccaatcgcgataaacgaggccagcgtcgccaccagcatgattaaccccggtctcgcgctctgcgccaggtttccgctggtcagcgccccgcacgcggcgccgagcggaatggcggcgtacagcacgccaatctctgaggcgctcatctgccactcgcccgccagcgccgggtacagcacgcgcacggcgctcgccatcgtcagcaggccgccgagcagcgcaatgccgccaatcagcgggttgctgaacaggaaacgaatcgcggccatcagggacttcagcggatgctcgcgcggctgcggcgggggtggcaggagtggcagacgcagcagcgtcagggtggtgataaaggttcccgccgcggcaaggccgtagttccacgccacgttgccggtcgccagaagcaggccgccgaccatcggcgaaatcaccgatcccagacgcacggtgagcatggtgatcgcccccgcctgcatcaggttctcgcgcccgaccagcgcgggcgtggccgccagcagcgccgtcacgcctaacgaggcaaaaaagccgtcccacaggcccagggcataaatcgccatcagcgacggctccggcagcattgcgttcagacacagcccgacaaagcccaccccgcaggtgccgcgcgccagcaggatcagttttttacgctcgtagcggtccgccagcacgccgcccaccatcaggccgataaacatcgccccgctggttaaggtgacggataaccccaccagccagctggagtgggtcatggtctggatctgtaccggcacggcgaccccgagcaggccgagggataaaatggagataaagcgggcgataaaaaccgctcgaaacgccgggtgcgttttcagcaggctgtggttgagcagccaggatttttgattcatgacaaggccttgaggtatcggtctaccatttccatgggcgcacatgctaacatagccaaataagatagataacgataattactatcattatcacatcatggacgttgctatgtcgttttcctcttccgcggtgcgcgccgtagccgtgcccgttttattgctgctgttgatccttgcgattgcactcagtttgctggttggcgcgaagccgctgcccgcgtccgttattgtcgatgcactctccggtacctgccagagcgccgactgcattatcgtgctcgacgcccggctgccccgcacccttgccggcctgctggccggtggcgcactcgggcttgccggtgccctgatgcaaaccctcacccgcaacccgctggcggaccctggcattctcggcgtgaactctggtgccagtttcgccattgtgctcggcgcggcgctgtttggtttcacctctccgtctgaacagctggtgatggccttctgcggcgcgctggccgcctcgctggtggtggcctttaccggcagccagggcggcggacagctcagcccggtacgtctgacactggcgggcgtggcgctcgcggcggtgctggaaggcttatcgaacggcatcgccctgctcaacccggacgtgtatgaccagctgcgcttctggcaggccggttcgctggatatccgtacccttgataccctgaaagtggtggcattcccggtgtttatctctgccgccgtagcgctgtgtttaagccgggcgctcaacagcctgagcctcggcagcgacaccgcgaccgccctcggcaaccgcgtggcgcgcacgcagctgacgggcctgcttgtcatcaccgtgctgtgcggcagcgcgaccgccgtcgtcgggccgattgcctttatcggcctgatgatgccgcacatggcgcgctggctggtgggggcggatcaccgctggtcactgccggtcacgctgctggcgacccctgccctgctgctgtttgccgacgtactgggccgcctgctggtgccgggtgaattgcgcgtctcggtggtcagcgcctttatcggcgcgccggtgctgatcttcctggtacgacgcagacgcgggggtggcgcatgatggccccgtcccgtcgattactcaccagcgtcgccctgctggtcgtcgccagtctgctgctggcggtctggagcctgcaaagcggtgccgtaacgcttgatttcgcgcaggtctttcacgctctcaccggcagcgcgccgcgtaacatcaccatggtggtcaccgaatggcgactgccgcgcgtggcgatggcgatcctggttggcgcggcgcttggcgtcagcggcgcgatattccagtcgctgatgcgtaaccccctcggcagcccggacgtgatgggcctgaataccggcgcgtggagcggcgtgctggtggcgatggtgctgttcgggcagcatctcacggccattacctttacggcgatggcgggcggcattctcacctccctgcttatctgggccctggcctggcgcaacggcatcgacaccttccgcctgatcatcatcgggatcggcatccgcgcgatgctgatggcgtttaacacctggcttctgctacaggcgtcgctggaaaccgcactctccgccgggctgtggtacgccggttccctcaacggtctgacgtggggaaaaacctggcccgccgcgccgctgattatcctgatgtttattggcgcgttgctgctggtcaggcgcatgcgcctgctggagatgggcgacgacagcgcctgcgcgctgggcgtgagcgtagagcgctcgcgcctgatgctgatgctggtggcggtcttgctgaccgcagcgtctaccgccatcgccgggccgatctcgtttattgcccttgtcgcgccgcatatcgcgcggcgacttagcggcaccgcgcgctggggattaacccaggcagcgctgtgcggcgcagtattactgctggccgccgatctctgcgctcagcagctgtttacgccttatcaactgccggtgggcgtggtgaccgtcagcctcggcgggatttacctcatcgtcttgctcgttcaggagtcacgcaagaaatgacagattcaacaccccgcttgcgcggcgaaaacttgaccctcggctacggtaaaaaaatcattgcccgggacttatccgttgccattccggacggccacttcaccgccatcatcgggccaaacggctgcggcaaatcgacattgctgcgcacgctgagccgcctgatgtcgccggttgagggcagcgtgttcctcgacggggagcagatccagcgcttcgccagcaaagaggttgcgcgccgaattgggctgctggcgcagaacgccaccacgccgggagacatcacggtgcaggagctggtctcccgcgggcgctatccgcaccagccgctgtttacccgctggcgcaaggaggacgacgaggccgtgaagcgcgcgatgcaggcgacgggcatcaccgatctggcccagcaaagcgtcgataccctctccggcggacagcgccagcgcgcgtggatcgcgatggtgctggcgcaggagacctccatcatgctgctggacgagccgacgacctggctggatatcagccatcagattgacctgctggagctgctgagcgaactgaaccgtacgcaggggtataccctggcggcggtgctgcatgatttaaaccaggcgtgccgctacgcgacgcatctgattgcgctgcgcgacggcgagattgtggcgcagggcgcgccgaaagagattgtgacgccggatctgatcgcgcggatctacggcatgcgctgcatgattattgacgatccggttgcgggtacgccgctggtggtgccgttgggcaagcgtgcggtctgatgccctcaccccggccctctcccacagggagagggagcaaaccatcccctctccccgtgggagagggttagggtgaggggctttaaacgttaccccaaaatttccttcagtaccggcccaatcttctcaaacgcctgcggtgaaataatatccacgtgggcgcagtcctggctgtacacctccagctcacccacccacggcgcccacgcggcctgcggatccagggttcgcgttcgctcggcgacaaacagcgtcgctttaccgtcaaaccgcgcgctgtgcgccgtggtgagcagccgcaccgcgtccgcatagttgccttcaatggcgttaaacaactcgctggagccctgcccctgctgggcggcaataaacgcctgacgttcgcgctcaatttccgccagcacctccggatcgaggccgttggcctctttctccgcccagttctgggtttccggtggccaggtatccagcaggccgaggaacgctacgtcttcaccctgctcgcgcagacgcgccgcaatgccctgcgccagcgtgccgccgagggaatagccgaacagataatacggcccctgcggctgttgcttacgcaacgtgttcagatgatgttcgatcaccgcatcgagatccgcacactgctgcatcggcccctcaggccggggagactgaatgccgacgattgaccagcgcgggctgaggtagcgcgccaggacgctaaactgccaggcaaagccggacgccggatggaagcagaacagcgtggggccgttgctttcacgcagcgggagaacggtttcataccccagacgctgcgcctgctcgtcgctcatctgcgagtccagcagggcgctaagcttgctcaccgtcgaggcgaccataatctgccccggcgtgaccttgcggctgaacgcacggctgagctgagccgcaaggcgcatcgccagcagcgagtggccgccgagggcaaagaaatcggcctcgatatcgttcaccgcgcagcccagcagggcagaaaacgcctgcgccacggtgacttcggtttgcgtctcgggcgcgcgaccggaagttttgctggtcagctccggcagcggcagcgccttgcgatccagtttgccgttggcgcttaacggcagcgcgctgatttgcagcagcaccaccggcaccatatgcggcggcagctgggctttgagtgatgcaagcagcgcgtcgcgatccagcggtaagccggattcagagacaacgtatcccaccagctggcgggcatcgccgcccgtggcagccgcctggttgaacacgcaggcgtgcgccaccgcctgggccacatccggcagcgcgagcatcgcccggtcgatttcgcccagctcgatgcgctggccgcggattttcagctgatcgtcgctgcggcccagatattccaccgcgccgttgtccagccagcgggcaacgtccccggtgcggtacattcgctcgccgggggcaaacggatcggcgataaagcggctggcggtaaggtcggggcgtcccagatacccctgcgccagctgaatgccggtgagatacagatcccccgccacgccgaacggcaccgggcgcatcatcgcgtccagaatgcgcagccccgtattccacaccgggaagccaattggcacgctgttgccctccaccgccgccagctcggggccaaacgccggataccagctcacatccaccgccgcttcggtcgggccatagaggttgtgcagcggcgcatgggtgagctgttcccactcgcgacacagcgcagtcggcaacgcctcgccgctacagaacacctgcttcagcgtcctgcaacagtcgacgttttccggcgtcagcgaggcgacgaacgccgccagcatcgacggcacgaagtgggtggtggttacgccatattctgcgaagaagccctgcatcgcctgcggatcgcggtgcgcgtccggctcggccatcaccagcttcgccccggcgataaacggccaccagaactcccacaccgacacgtcaaagctgcacggcgttttctgcgccaccacgtcatgcgccgccagtggataatgatcctgcatccacttcaggcggttaacgatggcggtatggccgaccatcaccccttttggacgccccgtcgaaccggaggtaaagatgatgtacgcggtctgctccggcttcgccaggcgcagaggttcagcatcggtggccggtaatagtgtgttgtaactaaaggtggcgatcggcagatcgttaaagcgcggaagctgctcgtcggtggtaatgagcagcgacggcttcgcgtcctccagcatcatccgcagacggtcatccgggtaaccggtatccagcggcagccaggcggcgcctgcttcaacaatcccgtgcagcgccagggtcaggaacaccgagcgcgggagcgccaccgccacgctgtcgcccggcttcacgccgcgcgcgcgcagcaggtttgccagcgcgaccacctgctcgcgcatctggcggtagttcagttcagtatgggcatccgccagcgcgggggcgtccggcgttttgctcgcctgctccgccacaagatccgccagcgtggtggacggcagcgccagcccggtatcgttgatgcgcgccagccgggcgtattcctgctctgatacggtttccacgtcgccacagcgcaggtccggattggcggcaaactgcgtcagcattgcgttcaggcgcgccgcgtgccccttcagcgtcgcctcgtcgtaacgctgcccgttggcgaggatctcaatgctcagtccgccctgctcgtccgggaacagcgccagctccagatcgttcaccgggccggttgccagcgtgtgggtaatggcctccacgccgtcgatattcagctgataatcgaacaccttgacgttcagcacctgaccaaaaagggcttcgtcgcctgcggcacgtccgctgtcgcgcacgatctgctcggcgtcgtaacgctgatggcggcgcatctttttcagctggttcgccaggcgcagcgccagttccggcaggctctcctgcgggcgaatattcaccgccagcggcaggacgttgagcaccggtccggtcgcggtcagcgcggcggagcccatacggcgcataaagataaacccggcggcgtagtccagccgtccggtcaggcggcccagccacagcgccaccagcgcaagggccagatcggtacgctgcgcctggcctgccttctgtgcaagctggctgaacgcacggccgtccatcgcaattttcaggcgcaggatatcggtggtggcggcgcgtcccggcagcggcgcggaagagagcgagaccggagaaggaagctgtttgcgttgttcggcccagaaagcaccgtcgcgctgatacgcctcgctgtcgcgatagcgctgatactcctccaccacctcggcgaacggggtgaacggcgaggccggcgtggattcacctttctgccacgcagcgtaagtggcggcgatctgacgggtaatagcagggaagctgaagccatctaccaccagatgatgataccgctgataccagtaccagtggctttctcccacctggatcagctggtgaaacgccagcggctgaccgctgtcgacgcgcaggttctggttgagatcggcctccatcagcgccacggcggcgtcgtgggagtcaacgcgcacgatggacggctccggcaggagtatggcctcatcgatccactgccacacctcaccgttatcttcggcaaaacgcatccgcagggtgtcggcctgcatcatgccttcagcgatggcttttgccagcaatggcgcatcgatagcgcctttcagctcggtgtaatgcgcgacgctccaggcgtttggcagggaggaaagctgctctgccatccagatccccggctgggcggcgacaagagggagacggttcatgcgcgctcccccgcaaaacatgacggctcaagcgtctgccactgttccgccagccactgctggcacgcctcctgagattgcggttcgcagaccacgcgccagcccgcgggcaactcgcactgctgcggccacaggctgtactgcccctggtcattttgcaaaatggcgaactgtccctgcggattatcgaaaggattgctgaattccatacagactccgttattgaataagcgactgccagagggtcatcagcccctgcgtcagcccaccgcgccagcaaagcgcatcgtgtccgccgtcaacctgacgccagaaaaccggttgctgagtgtgtagttcggcgaggatcgcctggtttgcgcgcaaaataagcggctcgttgcgcccggcctcaaggacgatgcgcagcccgcgagcggttttgtcacccgctttgagttgttcgatgagcagcccgtcctgctgcgcgccgcggtgcggccaccagtaggatccggactggctgaggatgcagccaaaacgctgcggccagttgaggcccgcatagagggaagagagcccgccgaagctctgacccgccaccacggtatggtcggcgcggtcgctgaacggggccatgcttttcacctgcgggagaagttcgtcctgcaccgccagccagaaatcagggttacacggcagctcgcggctgcggtgtgcggtgtcaatcacgtcgattaagacatagaccgcaggcggcagtttgccttcatgggtgagcgacgccagcgcaggccagacgggcatgctttcggcccagaactgcccgtcgagcagcaccgccagcgggcgctcggggctttcatccccggtggtaaaaatccacacgcggcgacggttcttcagacgcgcgctgtgccactcaatgcagacaggctttttgtaaggggtatcgggatggttccagccgggctgtacgggcgcctccggcatctccagcgccgagacggcgtgcccgcgcccgccgcgccagctctgggcattcagcgggtcggacaccgcgtgcggcaacagtttgcgccagccttcgcgcagcgccatgcggtccggctgatcgccttcaaacactgcgctggcaaaatcgttttcattgtcggaggggataaaacagtagctgccgcgccattcggggttgaactcgccctgccactgccagacgtcggtttccgggatacgttcaagggactgcggacgggcattttgatggtgatcggtcacaccggtgacgtagagccagacgcgtttaaccgtcgacgttttctgcgttcccgccgggtcccgccaccagaatgtcacgcgatagttttcctgatgacgttcccgttccggcccgtctttcgcctgccaccacgcttcacttccggttgttaacgccgtcacccttataaccccatgtttaacagtcttttttgtttcagagcaaattttattgataatattattgataactatttgcatttgcaatagcgtaatgcccgcgctgtgggaagcgcgctcattaaataaccataaaagcgggacgtacaatgaataagaagattcactctctggccttgctggtcaatttagggatttatggtgtcgcgctgcccgtcatggcagacgacaacaccgcctccgcgcagcatgaagacaccatggtgatcaccgccgccgagcagaatttgcaggcgccgggcgtgtcgaccatcaccgccgacgagatccgcaaaaacccgcccgcgcgcgacgtggcggaaatcatccgcaccatgccgggcgttaacctgaccggcaactccaccagcggccagcgcgggaataaccgtcagattgacattcgcggcatgggcccggaaaacaccctgatcctgatcgacggcaagccggtcaccagccgcaactccatccgtctgggctggcgcggcgagcgtgatacccgcggcgataccggctgggtcccgccggagatgatcgagcgcatcgaagtgatccgtggcccggctgctgcccgctacggtaacggtgcggcgggcggcgtggtgaacatcatcaccaaaaaatttgacgaccagtggcacggctcctggaacacctacctgaatgcgccagagcataaagacgaaggttccaccaaacgcactaacttcagcctgagcggcccgctgggcggggatttcagcttccgcatgtacggtaacctggataaaacccaggccgacgcctgggacattaaccagggccatcagtctgaccgtaccggcgcatatgccgacacgctgccggcaggccgtgaaggggtcgagaataaagacatcaacggcgtggtgcgctgggattttgcgcctatgcagtccctggagtttgaggcgggatacagccgccagaacaacctttacgcgggcgatacccagaataccaacaacgacaacagctcaagcgggctggtgaagaagaactacggtaaagagactaaccgtatctatcgtcagaacttcgcggtgacctggaacggcggctgggataacggcattaccaccagcaactgggcgcagtacgagcacacccgcaactcgcgtctgggcgaaggcctggcgggcggtctggaaggcctgttcaacagcaataaattcaccgataccgacctggccgacgtgatgctgcacagcgaaatcaacctgccgattgatttcattgtgaatcaaaacctgacgctcggcaccgagtggaaccagcagcgcatgaaggactcgacctccttcacgcaaacccagcagggcggcaccattccgggcatgagcgaagaccgtagcccgtacacttcagcggagatcttctccctgtttgccgaaaacaacatggagctgaccgacagcaccatgctgacccctgccctgcgcttcgaccaccacaccattgtgggtaataactggagcccgtccctgaacctgtcgcagggtctgggggatgacttcaccctgaagatgggcatcgcgcgcgcctataaagcgccaagcctgtatcagaccaacccgaactacctgctgtacagtaaaggccagggctgctacgccagttccgacggcgtgggctgctacatgatgggtaacgacgatctgaaagcggaaaccagcatcaacaaagagattggcctggagtggaaacgcgacggctggctggcgggcgtgacctggttccgcaacgactaccgcaacaagattgaagcgggctatgcgccgattggccagacgtccaccggcaaagtcaccaccgatatctaccagtgggaaaacgtgccgaaggcggtagtggaaggtctggaaggctccctgaacgtgccggtcagcgataccatcaactggaccaataacatcacctacatgctgcaaagcaagaacaaggagaccggcgatcgtctgtcgatcatcccggagtatacgctgaactctaccctgagctggcaggtacgtcaggatgtctcattgcagtcgaccttcacctggtacggcaagcagcagccgaagaagtacaactacaaaggtcagccggtgaccgggtctgagaaagacgaagtcagcccgtacagcatcgttggcctgagcgcgacctgggacgtgaccaaaaacgtcagcctgaccggcggcgtggacaacgtcttcgacaagcgccagtggcgtgcgggtaacgcccagaccacgggtaataccaccaccggcgcgtatatgtacggtgcgggcgcgtatacgtataatgaaccgggccgtacctggtatatgagcgtgaatacgaggttctgataaaggcagtgacttccccctctccccatgggagagggccggggtgagggcatcaggccgcacaatactgnnnnnnnnnnnnnnnnnnnnnnnnnnnnnnnnnnnnnnnnnnnnnnnnnnnnnnnnnnnnnnnnnnnnnnnnnnnnnnnnnnnnnnnnnnnnnnnnnnnnnnnnnnnnnnnnnnnnnnnnnnnnnnnnnnnnnnnnnnnnnnnnnnnnnnnnnnnnnnnnnnnnnnnnnnnnnnnnnnnnnnnnnnnnnnnnnnnnnnnnnnnnnnnnnnnnnnnnnnnnnnnnnnnnnnnnnnnnnnnnnnnnnnnnnnnnnnnnnnnnnnnnnnnnnnnnnnnnnnnnnnnnnnnnnnnnnnnnnnnnnnnnnnnnnnnnnnnnnaccatgcacaccacccacagcacattttctctcgccggccacaccctccaccgcatcactttcgaccccgccacctttaccgacgccgatctcctctggctcccccatcacgcgcagcttgctgacgccggacgcaaacgcaaggccgaccacctggcaggccgcatcgccgccgcgcacgccttacctgaccacaccatgcccgccatcggccccagcggggaaccgctctggccgcaaggtatttccggcagcatcacccacagcggcacgcaggcgatagccgtcgtcacgcaatacccggcgcttatcggcatcgattgtgaaacgatcctcttcgaaaacgaagccagggaaatcaaagacggcattattgatacgcaggaagaacctgtgctttcccgccagggatacccgttcgccctcgccctgacgctggtcttcagcgccaaagagagcctgttcaaggccctctttccgcaggtacaggcctggatgggttttgacagcgcccgcgttaccaagctcgacgacaagacgctcacgctggcgttgacccgtcaactggcaggctttgaagaaggcaccgccttccgcctgcactggcagcagcacggcgaacaggtcatcaccctgctgtcacacgctcctggcgacgagccttcacgctggtcaccacaaacgtcacgataaacaccatcgcgaacaggaccacaatggtcggcgcaggcgcgctgtcgagataaaacgaggcataaacgccgcttaccgacaccagcgctgaaacggcgaccgccaccagcagcgccatgtgaaagcgtcgggtaatcaacaccgccacggcgccgggcgcaattagcagggaaatcgacagaatgatccccaccgctttcagcgtcgcgacgatggtcagcgaaaccatgcacagtaagccgtagtgcagccagcgggtgcgcaggccactcgcctgcgcctgctgatagtcaaagcaaaacagcagaaaatcgcgccacttcaggccaatcaccagcgcaatcagccccgcgacgagaccgctttgcagaatgtccatcacgttaatacccagcatatcgccgaacagaatgtggtcgagatgcacctcaggtttgacggcgatatagaggatcagcccggcgccgaacatgccggaaaagacgatccccatgaccgtatcctgtttgatgcggctgttatccttcagatatccggtggcgaccgcgcagaaaagaccggctacgaacgcgcccagcgccagcggcaggcccatcatccaggccagcacgacgccgggaaacaccgcgtggctcatggcgtcgcccatcagcgcccagcctttcagcaccagaaaaaccgacagcagcgcgcagggcacggccaccatgagtgaaatcagcagcgcgttgttcataaacgcaaactggaacggttcgagaagcagcgtcaacatgggtgtgcctcccgcgcccgacgtcggctggcaagcagtccgtgcttcggcgcaaagacgaacgccagcaggaacagcagtgtctgggccacgacgataatgccgccggtggcgccgtccaggtaatagctggcccacgcgccgaggaagctggtgatgctgccaatggcgacggcaatcatcagcaggcgcgggaagcggtcggtcagcagccacgcggtcgcgccgggcgtgaccaccagacagatcaccagaaatgcgccgacggtttgcagcgccgccacggtagagaccgccagcagcgtgaagaagagaattttcaggcgttcaggacgcaggccgatggcgcgggcgtggttctcatcaaaaaaggtcaccatcagatctttccatttgaacagcaggataactatcgacaccacgccgataatcgccagctggacgatatcttccggggcgatagccagaatattgccgaggacgatggtctgaatgttcaccgaggtcgggttgagcgagaccataaacagccccagcccgaaaaacgaggagaagatcagcccgataatggcgtcctccttcaggcggctgcgctggttgagaaacagcatgctgcccgccgccagcccgcccgacaggaacgcccccagcgagaacggcagcccgagcatgtaggcccccgctacgcccggcacgatggagtgcgacagtgcatcgccgatcagcgaccagcctttgagcatcagatagcaggagagaaacgcgcatagcccgcccaccatcgccgagacccacatcgcgttgagcatgtactcgtagccgaagggttcgagaagcacgttcatttggcctcctgtcggtgcgtgacgaaggggcgttcgtcgtcggtaataatgcgatcttccgagccgctgagcaccacgtggcgcagcacgccgctaaaggcgcgctcgagattctcggcggtaaaggtggtttccgtcgggccgctcgccagcacggtgcctttgaccatcaccgtgtaatcgcagaattccgtgaccgagcccaggttatgggtcgagaccagcatcgttttaccctcgtcgcgcagctcccgcagcaggctgatgatcctggcttcggttttgacgtccacgccggtaaacggctcgtcgagcaggatcacctcgccctgctgggcaatcgcccgcgccagaaacacgcgcttcttctgcccgccggacagctcgccaatctgccgatggcgcagctcgagcatatctacacgcttcagggcgtcggtgacgatctgcttatcgcattctttgggacgacgcagaaaccccatatgcccgtagcggcccatcatcaccacgtcctcgacgagcaccggaaacgaccagtcgacctcttccgactgcggcacgtaggcgaccaggttctgacgcagcgcccggtgaggcggcagccccagaatggagatagtgccgctcgccgcccgcacaaaccccatcaccgccttaaacagcgtggacttgccggaaccgttcacccccaccacggcggcaatcgatccgcccggcacgctgaacgatgcgtcgcgcagcgccgtgtggccgttgcggtaggtcacggtcacgtcggttacaacaatcccctcgtgcatggttactccttcatgccgtcacggatgccctgcaccagcgtgcgggtggtgacgttcagcagatcgatataggtcggcaccgggccgttttccgcgctcagagagtcgacgtacagcacgccgccatagtgggcgccggtttcacgcgccacctgacgggcgggcttatccgagaccgtgctttcgctaaacaccgccggaatgtgatgttttttcaccagatcgataaccttgcgcacctgctggggcgtgccctgctgatcggcgttgatcggccacaggtaaagctctttcatccccagatcccgcgccagataggagaaggcaccttcgctggttaccatccagcgtttgtcttcaggtatctccgcgacctgcttgcgcagcggttcgagagtggcggtgatcttatgcttgtaggcttccgcattgcgctgataggtctgtgcgttggccggatcgtacttcaccagcgcgtcgcggatgttatcgacgtaaatcagggcgttgtccggcgacatccacgcgtgcggattgggcttgccgttatagggcccttcgctgatgcccatcggggtgatgcctttggtgacaatcacctccggcacgccgttcagatgctgataaaagcgctggaaccacagctccagattcatgccgttcgccaggatcagctgtgccttctgcgcgcgtttgatatcgcccggggtgggctggtattcgtgaatttccgcgcccggtttggtgatggaggtgacctctgcggcatcccccgccacgtttttcgccatatcagcaataacggtaaaagtggtgatgacctggaacttttcagccgccagcgcgccggtcgtggtcgcagtcatgagcagcgcgccgagcaacagacgcttcaatccttgccgtggatgcatcgcagaagtctcctgaggtgattaaattcaaagcaaaattagcctgtgctataaggtatagcacaggctatgtttaaatgaaaataattatcattaaagttgtgtcaatgaagggcgtgcctgatgacgcttcgcttatcaggcctacggtaaagcatatttgtaggccgggtaagcgcagcgccacccggcaagaaagatggctggattgttaacgacaggggtttgtcatcatttaaacatccggaaacatcacgctattccccggcgcttccctgtgcagatggataaagttcaggtgccgttcatactgatccagaatgtccgtaatcacctgctccttgctgtaatccatcaaatcattcccctggctgccttccagcaggaaggtctccagccggtagtaggtcgacttcccgctgcgcgcccggtaggtgaacccgggcaccgaatactgctgcggccagatctgatagacaaagttctgctcgtcgcccatgtgcaccagcagatccaggtgccccagattttcgccctcttccgggggcaggtttttcagctccacgtaggcgccacgcagcttcagctcctgggccacctcttccatcgccgggaaacagaccgtctccatcatctggctggtgtagcgcgtgccggggtagttcatcaggcgcgagaggcgtttcttccagctcagcctgtcctgcgcgcccagcggacgcggggcggtgtcgcggctggcgctgacgcggcggtagtcttccaccttaagcgatttatacagcccggccatcacgaagaagatcacgaagctgaacggcaggcccatgatcacagtggtgttctgcaacgccgagataccattggtcatcagcatgccgagcgtcagcaggccgatggcgacggaccagaagatgcgcagccagttcggcgcgtcgctgttaatgtccttgagcttcgaggtgaagttccccagcaccagcgcgccggagtccgccgaggtgacgtagaacagcaggccggtaatggtcgctacggacgcgctaaaggtaaacgccggatactgcgccagcaggctgtagaagccgcgctccgggtgcgccatcgcttcctgggcaaaagtcgcattgccgtggatgatctcgtgcagcgcgctgttgccgaaaatcgacagccacagcagggtaaaggtgaatgggatgatcagcgtgcccatcacgaactgacggatggtgcgcccacgcgaaatacgcgccaggaacaggccgacaaacggcgaccacgccacccaccacgcccagaagaagagcgtccagttgttcatccactctgtcggacggtcaaaggcgaagctgttcagcgtcatgcccataaagcggttcacgtaatcacccacgttcagcactaaggcattgagcaagaacgaggtgtcgcccataaacagcacgaacaggatcagccccagcgccagcgcgacgttcagctcggagagcacgcgaatccctttatccacgccggaggtcaccgagatggtggcgataatcaccgacagcgcaatcagcgccgccttcgccgccatcgaatccgggatgtcaaacagcacgctcagcccgtagttaagctgcaccacgccaatcccgagcgttgtcgcgataccaaagatggtgccgatcaccgccgcgatgtctaccgtgtgcccaatcgggccgttgatctttttgccgaaaatcgggtacagcgcggagcggatggtaaggggtaaattataacgatagctaaagtatccaagcgccatgcccatcagagcgtacatcgaccagcccgtcaggccgtagtggaacagcgtccagaccatcgcctggcgcgcggcctccatcgtctgccctgccccttccggcggctgcatatactgcgtgaccggttccgccacggagaagaacatcaggtcgatgccgatgcccgcggcaaacagcatcgcggcccagctcagcaggctgaattnnnnnnnnnnnnnnnnnnnnnnnnnnnnnnnnnnnnnnnnnnnnnnnnnnnnnnnnnnnnnnnnnnnnnnnnnnnnnnnnnnnnnnnnnnnnnnnnnnnnnnnnnnnnnnnnnnnnnnnnnnnnnnnnnnnnnnnnnnnnnnnnnnnnnnnnnnnnnnnnnnnnnnnnnnnnnnnnnnnnnnnnnnnnnnnnnnnnnnnnnnnnnnnnnnnnnnnnnnnnnnnnnnnnnnnnnnnnnnnnnnnnnnnnnnnnnnnnnnnnnnnnnnnnnnnnnnnnnnnnnnnnnnnnnnnnnnnnnnnnnnnnnnnnnnnnnnnnnnnnnnnnnnnnnnnnnnnnnnnnnnnnnnnnnnnnnnnnnnnnnnnnnnnnnnnnnnnnnnnnnnnnnnnnnnnnnnnnnnnnnnnnnnnnnnnnnnnnnntccactcggcagaaaaatcacgaaagaaaatggtcgtcagggaaaacaacaaaatcagcccggcggacgtataaaaaacgaccgggttgattttgtctttttctctgtcctgtgaaaggtctgtcatccagtatccccactgtttttgtaactattgaaatccaaatccgcaacaattaagacacattttatattgaacgtccaatcaaaaaccgctttaatggttaaccaacgctgatgaagggagtggcaaaaatgcccaaagtggggatgcagccgatccggcgcaggcagctaatcgatgccacgctggaagcaattaatgaagtgggaatgcatgacgcaaccatcgcgcaaatcgcccgtcgggcgggcgtatccacggggatcatcagccactatttcaaagataaaaacggtctgctggaagcgaccatgcgtgacatcacgggtcagctgcgcgacgcggtattaagccgtttacgcgccctgccggacggcagcgcagagcagcgattgcaggcgattgtcggcggcaattttgatgaaacccagatcagcggcgcggcgatgaaggcctggctggccttctgggccagcagcatgcatcagccgatgctctaccgtttgcagcaggtcagcagccgccgattgctctcaaacctggtgtacgagttccgccgcgagctgccgcgtgaacaggctgaagaggcgggctacgggcttgccgcactgattgacgggctatggctgcgcgctgcgctcagcggcaaaccgctggataaaaccctggcccagtcgctcaccagccactttattagccagcatttaccgaccgattaaccgaggagaatttatgtcccgaatggcagaacagcagctttatatcaatggtggttacacatcggccaccagcggtcgcaccttcgagaccatcaacccggcgaacggtgaagttctggcaaccgtgcaggccgccgggcgcgaagacgtggaccgcgccgtggaaagcgcacagcgcgggcagaagatctgggcggcgatgaccgccatggagcgctcgcgcatcctgcgccgcgccgtcgatatcctgcgcgagcgcaacgacgagctggcaacgctggaaaccctcgacaccggtaaagcgtattccgaaacctcgaccgtcgacatcgttaccggcgcggacgtgctggagtactacgcggggctgatcccggcgctggaaggcagccagatcccgctgcgcgacacctcgttcgtctacacccgccgcgagccgctgggcgtggtggcgggcatcggcgcgtggaactacccgatccagatcgccctgtggaaatcggccccggcgctggcggcgggcaacgcgatgatcttcaagccgagcgaagtgacgccgcttaccgccctgaaactggcggagatctacaccgaagcaggcgtgccggacggcgtgtttaacgtcctgccgggcgtgggcgcagagaccggccagttcctgaccgagcatccgggcatcgccaaagtctccttcaccggtggcgtggccagcggcaaaaaggtgatggcgaactcggcggcctcgtccctgaaagaggtgacgatggagctgggcggtaaatctccgctgatagtgtttgacgacgcggatctggatctcgcggcagatatcgccatgatggcgaacttcttcagctccggtcaggtgtgcaccaacggcacccgcgtgttcgtgcccgcgaaggtcaaagccgcgtttgagcaaaaaatcgttgagcgcgtgggccgcatccgcgcgggcgacctgttcgatgaaaacaccaactttggcccgatggtcagcttcccgcaccgcgacagcgtgctgcgctacatcgccaaaggcaaagaggaaggcgcgcgcgtgctgtgcggcggcgacgtgctgaagggtgacggctttgacaacggcgcgtgggtggccccgaccgtgttcaccgactgcaccgacgaaatgaccatcgtgcgcgaagagatcttcggcccggtgatgtccattctcacctatgacactgacgaagaggccattcgccgcgccaatgataccgactacggtctggcggcgggcatcgtcaccgccgatctgaaccgcgcccacggcgctattcatcagctcgaagcgggcatctgctggatcaacacctggggtgaatccgccgcagagatgccggttggcggctacaaacactccggcattggccgtgagaacggcgtcatgacgcttcagagttacacccaggtgaagtccatccaggttgagatgggtaaattccagtccatattttaaccgggaggtttatttgcaatttgactacatcattatcggagccggctctgccggcaacgtactggcaacacgactgactgaagatccgaacaccaccgtcctgctgcttgaggcgggcgggccggactaccgctttgacttccgcacccagatgcctgccgcgctggccttcccgttgcagggcaagcgctacaactgggcgtatgaaaccgagcctgagcctttcatgaacaatcgccgcatggaatgcggacggggtaaagggctgggcggctcgtcgctgatcaacggcatgtgctacgtgcgcggtaacgcaatggatctggacaactgggcgaaacaatcgggtctggagcactggagctacctcaactgcctgccctattaccgcaaggcagagacccgcgacgtggggccaaacgactaccacggcggcgacggtccggtgagcgtcaccacctctaagccgggcgtgaacccgctatttgaagcgatggtagaggcgggcgtgcaggcgggctacccgcgcaccgacgaccttaacggctatcagcaggaaggctttggcccgatggaccgtacggtcacgccgcagggccgacgcgccagcaccgcgcgcggctatctggaccaggccaaaccgcgcccgaatctgaccatccgcacccacgccatgaccgatcacattatctttgacggcaagcgcgcggtgggcgtcgagtggctggaaggcgaaagcaccattccgtcaaaagcgacggcgaagaaagaggtgctgctgtgcgcgggcgccatcgcgtctccgcagatcctccagcgctccggcgtgggcaacgctgaactgctgaagcagtttgatatcccgctggtacatgatttacccggcgtgggggaaaacttgcaggatcacctggagatgtaccttcagtatgaatgtaaggagccggtctcactctaccctgccctgcaatggtggaaccagccgaagattggcgcggagtggctgtttggcggcacaggcgtgggcgcgagcaaccacttcgaagcgggcgggtttatccgcagccgcgaggagttcgagtggccaaacattcagtatcacttcctgccggtggcgattaactacaacggctcgaacgcggtgaaagaacatggcttccagtgccacgttggctccatgcgctcgccgagccgcggccacgtgcgcatcaagtcgcgcgatccgcaccagcatccggcgatcctgttcaactacatgtcccacgagcaggactggcaggagttccgcgacgcgatccgcatnnnnnnnnnnnnnnnnnnnnnnnnnnnnnnnnnnnnnnnnnnnnnnnnnnnnnnnnnnnnnnnnnnnnnnnnnnnnnnnnnnnnnnnnnnnnnnnnnnnnnnnnnnnnnnnnnnnnnnnnnnnnnnnnnnnnnnnnnnnnnnnnnnnnnnnnnnnnnnnnnnnnnnnnnnnnnnnnnnnnnnnnnnnnnnnnnnnnnnnnnnnnnnnnnnnnnnnnnnnnnnnnnnnnnnnnnnnnnnnnnnnnnnnnnnnnnnnnnnnnnnnnnnnnnnnnnnnnnnnnnnnnnnnnnnnnnnnnnnnnnnnnnnnnnnnnnnnnnnnnnnnnnnnnnnnnnnnnnnnnnnnnnnnnnnnnnnnnnnnnnnnnnnnnnnnnnnnnnnnnnnnnnnnnnnnnnnnnnnnnnnnnnnnnnnnnnnnnnnnnnnnnnnnnnnnnnnnnnnnnnnnnnnnnnnnnnnnnnnnnnnnnnnnnnnnnnnnnnnnnnnnnnnnnnnnnnnnnnnnnnnnnnnnnnnnnnnnnnnnnnnnnnnnnnnnnnnnnnnnnnnnnnnnnnnnnnnnnnnnnnnnnnnnnnnnnnnnnnnnnnnnnnnnnnnnnnnnnnnnnnnnnnnnnnnnnnnnnnnnnnnnnnnnnnnnnnnnnnnnnnnnnnnnnnnnnnnnnnnnnnnnnnnnnnnnnnnnnnnnnnnnnnnnnnnnnnnnnnnnnnnnnnnnnnnnnnnnnnnnnnnnnnnnnnnnnnnnnnnnnnnnnnnnnnnnnnnnnnnnnnnnnnnnnnnnnnnnnnnnnnnnnnnnnnnnnnnnnnnnnnnnnnnnnnnnnnnnnnnnnnnnnnnnnnnnnnnnnnnnnnnnnnnnnnnnnnnnnnnnnnnnnnnnnnnnnnnnnnnnnnnnnnnnnnnnnnnnnnnnnnnnnnnnnnnnnnnnnnnnnnnnnnnnnnnnnnnnnnnnnnnnnnnnnnnnnnnnnnnnnnnnnnnnnnnnnnnnnnnnnnnnnnnnnnnnnnnnnnnnnnnnnnnnnnnnnnnnnnnnnnnnnnnnnnnnnnnnnnnnnnnnnnnnnnnnnnnnnnnnnnnnnnnnnnnnnnnnnnnnnnnnnnnnnnnnnnnnnnnnnnnnnnnnnnnnnnnnnnnnnnnnnnnnnnnnnnnnnnnnnnncggtagcgctgaatatactctccacgccgattgcctccatcgtcgatgaaaagcaggttgcggcgaacgtgaaggataacgacttcggcaacgcgtggttaaaaatgcactctgcgggcagcggcgcgttcaaaatgcgcgtttaccagccgcatcaggccatcgtgctggaagccaacgaatccgcgcccggcggcgcgccgaagcttaaaagcatcatcattaaaaacgtccccgatcccgcttcccgccgcctgctgatccagcagggtgatgcggacgtggcgcgcgatctgggtgcagaccagataatcgccctcagcggcaagccgggcgtgaaggtgcttagcatcccttctgccgagcaaaactatctggtgtttaacaccggcaacagcgctaacccgctgctgaataatccagcgttctgggaagcctcgcgctggctggtggattatgaaggcatcaccaaggacctgctgaaaggccagtattttgttcatcagagcttcctgccggtcggcctgccgggcgcgctggaggacaatccgttcacgtttgacccggcaaaagcaaaagcgatcctcgccagggcgggcatcaaagacgcgcatttcacgctggacgtagagaataaaccgccgttcatcaccatcgcgcaatccatgcaggcgagcttcgctcagggcggcgtgaaggtggatctgctgcccgcggcgggtagccaggtgtacgcccgcgtgcgtgcgaaacagcatcaggcggccatacgtctgtggatcccggactacttcgatgcacactccaacgccagcgccttcgcatggaatgacgggaaatccagcaccgtggccgggcttaacggctggaaaattccggagctgaacaacgctacgctggcggcggttgccgagccggatccggcaaaacgtctggatctgtataagaagatgcaggaacagttacagcataactcgccgtatgtgttcgttgaccagggcaaaacccagatcgtggtgcgcgataacgtgaaggggtatcagcaggggctgaacgcggatatggtctggtacgatcgcgttacgaagtagcccttgttgccgggtggcgctgcgcttacccggcctacgttcctggtttttgtaggccgggtaaggcgaagccgccacccggcataaagagatttcccatgccacatctttccacccgcgtgcttcagggtctgctgactctcctgctcacgctgttcgggctactgctggtcacgtttgcgctctctgccttttccccggtcgatcgcgtattgcagatcgtcggcgatcacgccagccagtccacttacgatcaggttcgccaccagcttgggctggatcggcctcttcccgtacagttctggcactacctgcaaaacctcgctcacggggatttaggcaccgccagcgctaccggtcagccggtattgcaggacctgctgcacgcctttcccgccacgctggaactggcaacgctggcgctaattatcggcacggtactcggcgtgattgcgggtgtactgtgcgcccgctacgccggttcgccactggacttagcgatcagaacgctcaccctgctcggcaattcggtgccaatattctggctcggcctgctgatgctggctctgttctacgcgaaactacagtggagcactggccccggcaggctggacgacatctggcaattcaccgtcgagccacgaaccggatttgcgctggttgatacctggctttccggcgaccgcgaggcgttccacaacgccatcagccacctggtgctgccggtgctgctgctggcctactactcgctggcaagtatcacccgcctgacgcgctccgcctgtctgagcgagatgaacaaagagtacatattgctcgcccgcgccaagggcgctggagagatgaccatcctgctgcgtcacgtgctgccgaacattcgcagtaccctattgacggtgattgcgctggcctacaccagcatgctggagggcgcggtattaaccgaaaccgtcttctcgtggccgggcatcgggcgctacctcaccacggccctgttcgccggtgacaccaccgccgtgatgggcggcacgctgctgattggcgtctgctttgttctgatcaataaccttaccgacctgcttgtgcgggcgaccgatcccagggtgcgctaatgccgttttatctcttcttacgccgcctgcgccgctctcctgccgcgttttgcgggctgatcgccatcgcgctgctggtgcttattgccctgttcgcgccgtggcttgcgccgcatgaccccaactggcaggacgccgccgcgcgtctgcaaccgcccaacgcgcagcactggctgggtaccgacagctatgggcgggatctgctctcccgattaatctacggcacccgtccggcactggggctagtggccttagtcaccgttattaccctccccgccggtctgctggtggggattttgtcaggctactacggcggctggatggagcgcatcctgatgcgctttaccgacgtggtgatgtcgatgccgcgcctgatcctcgccttcgcgtttgtcgcgatgctcggccccggtctggtgaacggcgcgctggcgctggccttaacgacctggcctgcctatgcgcgccaggcgcgcagtgaaatccagcgtctgcgccacagcgattatctggccgccgcggagatgatgggcattcgcggcccgcgcctgctggtcggccatattctgcccctgtgcctgccctccgcgattgtacggctggcgctggatctggccgggatcattctggccgccgccgggctgggcttccttggcctgggcgcacgtccaccgatggcggaatggggcgcgatgatagccgacggcatgcaggtcatttttgaccagtggtggattgccgccattccaggcggggcgattctgtttgccagcctggcctttaacctgctgggcgatggcctgcgcgacgtactggagccacagcatgactgaacaccgcgtcatcgtcgatgcgctgaatatcgactaccccgccgcgcgcgtggtcaacaacctgagctttacgttaggcaacgagcggctggcgctggtgggagaatccggctccggcaagtccatgtctgcccgcgccctgctggggctggtgcgcaagcccggcatcgtgagcgctaagcggcttaacgtgcttggcaacgacctgctgaccctgaacagccgccgctggcaggcgctgcgcggcaacggcattgcgatggttctacaggacccgcgctacgcgctaaacccggtgaaaaccgtcgccgcccagcttgatgaagcgctgaccctccatcagcgcctgccccgcgccgaacgcctggcgcgcattcacgatatcatccgcgcagtggggctgaacgagcacgtgctccagcgctatcccggcgaactctccggcggcatgggccagcgcgtgatgatcgccattgcgctcgtcaacaacccacaggtgctgatcgccgacgaaccgacttccgcgctggacgcacgcctgcgcaaccagatcctggagctgctggtacagcagtgcgaggcgcggcagatggcgatgctgctaatcagccacgacttgccgctcgtcgcggaacactgtgaccgcgtgctggtgatgtatcagggtgagaacgttgatgaaatggcggcgagccagttgccgcaggcaacccatccctacacgcgcacgctctggacctgccgcccgaacgccgggacgtttggccagatgctgccgacgctcgaccgttcgcaaccgtggaaggaggccgacaatggcactcgttgaggttaaccagctccgggtgagttttggtgaaaaaacggcggtttccgccgccagttttgcgatcgaaaaaggcgaaaccttcagcctgatcggtgaatccggctgcggcaaatcgactattctgcgcgtgctggcggggctgctgcgcgagtggaatggccacatttccgtcctcggggaaaatttacggccaggacgacgttttgaaggcgcgcttcgccgtaacgtgcagatggtgttccaggatccgtgggcgtctttgcacccgaaccacaccattgcccgcaccctgtcggagccgttaaacatccacggcgaaacccaggttgccgaaaaggtggcggatgcgctgcaacaggtgggtctggctgccgacgccggcaggcgttacccgcatcagctttccggcggacagcgtcagcgcgtggccatcgcccgcgcgctgctgctgcgcccgcagcttctgctgctggatgaaccgacctcggcgctggatatgtcggtacaggcggagatcctgaacctgctcaaccgcctgaaggcgcagcacggcatgacctacctgctggtgagccacgatgcggacgtgattgcgcatatgtccgaccgggcggcatttatggcgcacggggagatccggcgggtgtttgaccgtgaggcgatgttgcggggcgagcacaggatggggtaagtgtgcgcggcggtgcccggtggcgctgcgcttaccgggcctacgtttcgtgccgcgttgatggtttttcgtaggccgggtaaggcgtagccgccacccggcaaaaaatcacttcagcagcttcaccgtggcatcgatgtcgatctcatcttcagtgaagatcagcgtcgtgttctggaaggtagtgatcgccagcttcttcaccgtgcgcatttcgcccggctttttctcggttttgggtttgatgctgttcatcagcagccccaccgacagcaccgcattctctttgtcgattttggtctcaacgggctcttcctcgctgaacaccacgaaggatttaatggaggtgagcttcacgcgctcgcccgcaatataaagatgcttactctccgggatcaccttcaccgcatacgcggaaaggcctttgctgttggtggttggctcgaaggtcaccgccgcatctttcttaatcagatcagggttggcgaccttaatcacatgaaaatagcggttgtcgccgttttcatctttgataaatccaaagcctttatctttaaaccacgttgtgattgtaccgttcatcgctgttaccgcctgtcagatctcaagactaaagttttgcagcgcgcagtgtaatgcacaatggctgaggagacaaaaaaaagcccctgcacgggagcaggggaaagttcatgtcagagcttattagaatttagttgaacaccatcccaccatcaatcagcagcgactgaccggtcatgtagtcggaatccggcccggcgaggtaagagacgcaggcggccacgtcttccggctcggacagacggccaagcgtgatgcgtttggcaaaggtttctgtcccgtagccgagcggtttacccgccgcctcggagacctgacggtcgatttccgcccacatcggcgttttgacgatccccgggcagtaggcgttaacggtgatccccagcggcgcgagatcccgcgcggcggtctgggttaagccacgcaccgcgaacttgctggagctgtagaccgccagctccgggttaccggtatggcccgcctgggagcaggcgttgataattttgccgccgtgcccctctttacgaaaggcgtcaatcgcggcctgaatgccccagatcacccctttcacgttgatgttgtaaaccttgtcgacaatttccggcgtgatggattcgatgggcgtggacggcgccaccccggcgttattgacgatgacgttaaaaccgcccagcgcggtgcgggctttttccaccgccgcgaacacctgctcgcggtcagagacgtccaccttcacggcgacggccttcccgccgttacggttgatctcatccgcgaccgctttcgccgtctcttcgttgtaatccgcaatagcaacggcaaagccgtccttcaccaggcgaagcgcgatcgctttgccaatcccctggccggagccggttacgagagccactttttgcatttctctgtccttatattgattcacaaaatctggctgagatggagctggcccatcagcagcgggttatcgctgtagtcgacgggaatggccaccacggccgggccatcgtcatccattgccgcacgcagcgtcggttcgagcgcatcggcgctctcgacggcaaagcctttcgcaccgaacgcgtcggcataggctttgaaatcaaccgggccgaactcgacgccggacagcctctggtattttttctcctcctggatggccaccatgttgtaggcgttatccacccagatgatgtgcagcacgttggcgttgaggcgcacggcagtttccagctccatgctcgactgcaaaaagccgccgtccccggagaccgagaccaccttgcgccccgggttgaccagccacgcgccaatcgcccacggcagcgcgacgcccatggtctgctgaccgttggagatcatcacctgacgcgcccggaagctgtagaggtagcgggcgatccagatgtggaagctgcccatgtccacggtgagcgttacgtcattattcacgatgtcctgcatggcccggacgatgcgcagcggatgcagggcaaactggttgagcgacgcgccgcggcggtcgagcagatcgcgctgatgctgacggtcgaccagaatctctgatgcccgctggctcagctccagcttacgctcgatgcggttagcaagcaggttcagggtttcggcgatgtcccccaccagctccagatccggcacgtagttacgttcttcataggcgggcagcacgtcaatgtgcaccagcgtggcgtcgccgctgttccacatggacggctcgtactccaccgggctgtagccgatgcagataatcagatccgccaggtggagcagcctgtcgcctgcctggttgttgaacaaaccgacgcgtccggcaaagcgggtgaagtgttcctggttcaccgccccggcggcctgataggtgctggtcaccggaatgcggcttttctccagcagcgtgcgcagcgcggcgctgttcgcgggctggctggccatcaggccgagcaaaatgactggatttttggcgttttcgataagcttcgccacgtcgttaatggcggattccggtgccgggcccatcagcgccgggccgctggcgggtaaaatcgcccccgtcgcgggctggtcgacaatatcctgcggcaggctgacgaacgcgccccccggcctaccgtgctcggcggcgcgaaacgcgttcgataccacctcggcaatcgcatccggtgaattcacttcaacggcgtatttggtgaccgggctgaacatggcgacggtgtccatgctctggtgcaccagcttggctttatccgcccgcttcaccgccccgcccagcgccaccaccgggtcgccttcgctgttggcggtggcgatgccggtgatcaggttggaacagcccggcccggaggtgaccagcgcgaccccggccttgccggtcagccgccctaccgccgcagccataaacgccgcgttggcctcgtggcggacgggaataatctcgatggaggagtccagcagggagtcaaagaccttgtcgattttcgcgcccggaatgccgaacacctgcttcacgccctgcgcttccaattggccgacaaccatatcggcgccgtgcgcccactgacgtgactgtttctcactgttcacggtagttctcctgttagttttcgacggcgcggatagccgcatcaagattgctggggtgcaggttggcctgtaaaaacgcgctgtcggcgggcaggtcaatcatcagcttgtggatttcgccgaaggtgagcacgccgttctccagctgatagtcgagcaggtggcccccgccctgacggtcgtcggtgataaagtgttcgtgatagcccgccacgttaatgccctgcatatgctgcggggtacggaacccgaccagtacgccctcgcgctggttaaagcggaacaccggctggtcatccagcacgtcggtcatcgcccggtacggcggtgtctggcgcggtacggtgcgggtgtgcgcgtggcggaaattgccgtcgatgcgcagcgcgcagaacaggttatcggaggggatttgcttgtcgatcacgtcgtggatctgctgacggctgaccggcccgtcgaaggccttgcggtactgcggctggaaccaggtcatcaccgcgaacggcgtttttgtnnnnnnnnnnnnnnnnnnnnnnnnnnnnnnnnnnnnnnnnnnnnnnnnnnnnnnnnnnnnnnnnnnnnnnnnnnnnnnnnnnnnnnnnnnnnnnnnnnnnnnnnnnnnnnnnnnnnnnnnnnnnnnnnnnnnnnnnnnnnnnnnnnnnnnnnnnnnnnnnnnnnnnnnnnnnnnnnnnnnnnnnnnnnnnnnnnnnnnnnnnnnnnnnnnnnnnnnnnnnnnnnnnnnnnnnnnnnnnnnnnnnnnnnnnnnnnnnnnnnnnnnnnnnnnnnnnnnnnnnnnnnnnnnnnnnnnnnnnnnnnnnnnnnnnnnnnnnnnnnnnnnnnnnnnnnnnnnnnnnnnnnnnnnnnnnnnnnncggcgcgcagctggtacacctggctgctgaaggcaatcatttcaccgtccagctcgttaaaggtaccgagaccaaaatcaccgtgtgccagcaggtcggcgatggtcgtctccccttcgtagacgccgcttagcagggcgctcattagcgatgtctgatagatcacgctgtcaggatgctgagccgagaacccacgcagggtctcgcataaactcgcctcacagtcgcatgcagatgaatgcatcatcatgcccgtcctcttcaactttatttataaaggttaaataaatgttgacccgattcagcagagagttccaatatagaatccatgctggtttgagacgtttttgatatggaacttcgttatctgcgctattttgtcgcggtagcacgcgagcgacacttcaccagggcggccaaagcgctgggtatttcacagcctcctctgagtcagcagatcaaacggctcgaagaggaagtgggcacgccgctgttcaggcgcctgacgcggggcgtggagctgaccgaagcgggagaggccttctatgaggacgcctgtaagatcctggcgctgagcgatgccgcgctggagaaagcccggggcatcgcgcgcgggctgaacggcagcctgtcgattggcatcaccagttcagatgcttttcatcctaaaatcttcgccctgattcgccagtttcaggtgcagaacatggcggtgcaggttcaccaggtggaagccaatatgtcgtcgctgacgacgatgctggcggagggtgagctggatatcgccttcgtgcgcctgccgtgcgaaagcagcaaagtgtttgagttaaaaatcctcgatcgggagccgatggtggtggcgctgcatcgcgatcatcccctggcggcgtgtggcgatctggcgctggacgagctgcgggatacgccggtggtgctgttcccccaggaggtcgcgccggggctgtatgaccgcgtttacggcagctgcgagcgggccgggatcgatatgcaacacacgctgcaatcttcacaactttcctcttccctgagcatggtctccgctggcggcgggttcgcgctggtgccgaaatccatggccgctatttctccgccgaatgtcacctaccatgcgctgcgctcgccggagctttataccgatatcgcgctctgctggcggcgctttgagcgttcgcggacggtgaagcggtttctggcgatgatgagcgaggagtagctacggtgtggctgtgcccggcggcgctgcgcttgcgcgggcctacggttcgtgtcgcgggttggttggcttgttggcggttttgtaggccgggtaaggcgcagccgccacccggcaatgccctttggaagccgcctcgcaaacttttaagcaaccttatgtaattcaggggcatcccttttcatcccttcttcacctgcaacttcccgattctgcggatctctttgaactggctggcacctgtgcggcatacgtgagcgtactggtggaaatggacgatgcggtgacattttccacgctctgtaagcaactgctgggttgttagcggagtttgtgaaggagcattatataacggctcactgagtcggccttacacaaaggacaacgttgtttgatgaatgacggttaagagcgttcagcaggcttcgatgccagatcgactttcagccatctcatgactaaaaattactgttcgtgccgggtggggcatgcaattgttagaggaatgcacaggaaggcggtcacgccacagagggcgtgacataaaatcaggcctggtcgtcttctttaccgtagtaaagcttaccgatctgaatgagaggacggccctgggatttgcggtgcaggttgctgtcacgcagtgaataaacgcagccgcagtattcctgctggtagaactgctcgcgcttgctgatttcaatcatgcgcgacgaaccgccctgtttccgccagttatagtcccaatagaccatacccggatagtgggcggcggctcgctgaccgcagtcgttgatttgctgcatatttttccagcgagagatgcccagtgagctgctaatcacgttgaagccattttcagcggcgtaaagcgcagtccgctcaaagcgcatgtcaaaacacatggtgcagcgaatgccgcgctcgggttcccattccatgcctttggcgcgctcaaaccagttatctgtatcgtaatccgcatcaataaacggtacgccgtgctgttcggcaaagcgaatattctcatccttacgaatcagatactctttctgcggatgaatgttcggattgtagaagaagatggtgtagtcgatccctgaggcctggatcgcctccattacctcaccagaacacggagcgcaacaggagtgcagcagcagtttatcagccccgtttgggagttctagtttagggcgtttgaaatcagcggtagtcataaatttatttgatgaggtaatgaggactgaaaacagtgtagcatcagagctgtgctatcgggaatggcggccagtctcatacatatcccgcaatgcctgttattgacacatagcggacgcatctttcacacgtttctatataacctggttagcaaaactatctccgctgcacttcttctcagcaagcaattcctgaatacgctacgcaaattaaacaaatatttcagaccaagatagatcaggcacgttaacgctggatcatatgcgcgctggcgaagcgttttggtttgccggtgagtgcgtttgtagggaactgatgcgaggttttcacccagaccaattccccagacgttaataccactatctctctcaccccggcccctcgctccccgccgccagcagcggcatcaccacatcgctgacgggcaccgcaatcccgtgcctgcggccatagcgctggatcacgccgttgcgtatgtcccactccatcaggcgatccgcctgacggtcggacaggatcgacagcattaaagatctgcactgggacattcgccccagcccgcacattagcaccatgcaggtgcggtcgacggataagccgctgacgctcaacaacgcgattaatatcgcctggctgatccaggccacgtcacactggctgctgaccacgcggccttataagcatcaggaacgggattttctgcggtacctctttaccgttttcaggtgtgtcgctacggataggtggatattcagacgagccgttatgagtttttaaacaattaataaagagtcaaatagacagaatacccaataaacattcaagtatttattacatcttcaattaatattcacttaattattatttaagcaaaaccaccgtattaatcattaacaatttatccagatccaaaccataagcccccatactttcttaatttgcatcaacgaaaccgcagatcgttttatatccaccctgtacaaaattgacggccaattttgtacgcgctagcgttgcactagttacgtaacaagctaaaccataaggtcttttcaggatttccttaaatggagttttaaacaaatggctattcccgcttatttatggcttaaagatgacggcggcgccgatataaaaggctctgtcgatatatatggacgtgaaggtagcatcgagattatcgccttaaatcacggcataatgcagcccacggacaagcataacggcaaggcgacaagtcttcgcatccattccccctattctttcgataaagagatcgacgcttccagcccctatttgtataaggctgttagcacgggccagaagctaaaatccgcagagacaaagttttaccgtatcaacgatgctggtcaggaagtggaatatttttccacccttctggaaggcgtgaagatcgccagcgtctgtccaatgatgcttgatatcaaagatcctgactatgagaagcataaccatcttgagctggtagagctgctctatgaaaaaattacctggcgctacgtggacggtaaaatcatgcattcagatagctggaatgaccgtaagacggcataaggagaacgttatgggatggaagtatgagcaatcaactggcaagatgtataaagacggcaaattaattgagacaggatattccggtgcccttaccaataaaaataatccggaccgtcagcatgtgaagggtctgggtccattgccgcgcggaacatataaaattgcgggacattcgaattctaaaggacccattaccattatccttgagcaaacttcgggagagagttttggtcgttcagagttccgcattcatggtgaccataagtacggtccagccggatttgcttcggaggggtgcattattctctcactgtcaacgcgacgtaaaatccttcgtgacggcggtgagcttgaggtagtgcgatgaaatatccaatcgtcctgctgctttgtgcgctcactgtcccagccattgcagccagcactgactggccatcagcacttcatggaatcgcctcaggtgacacacactggattgagcaagccccaacgctggctgccacggctgacgtcaggcaggcgcaactgctggaggatgctttggccgcagcgctcacaacaaacaccagcgccacactgaaagcgctccagaccattgacgcgggaaagtggccgcacatggttggcagcgatatcgtctgcacgccgcctctagagaaatcccccgccgaagtcgacgcgttctatcagcgcacccgccgggcgctgctggatacggttgagggtgctcagtgcctctggatcctggaagcaacaatggaagagctaaacgctgagaaagcccgtcagggtaagtaagagagttacccggcgcacaacggccgggtcttccttctcgccagaccctggctcaccccggcccctcactccccgccgccagcagcggcaccaccacgtcgctgacgggcaccgcaatcccgtgcctgcggccatagcgctggatcacgccgttgcgtatgtcccactccatcgggcgatccgcctgacggtcggcaaggatcgacgtgcctaaatccactggcgcacgctggaagttcgccagaatctcctgggccaccgcatcgtccagcttcgccccttcggcgcgggcgacggtaagcccctcgcgcaggtaggccagcgccagctcgctgatatcctcgcgcctgaacatcccggcgcggcgattggccagcaccatcagcccggcgaccgcgttttgcagcagcttgcgccaggcgacggtagtgaaatctgtcgagagctcaacgtcacagcgcgtgccgcgaagcgcctccaccacccgctgcgcctgcggcacgtccggcagcgtaaggcgcggtttggcgcgcagccagacggaggcatccggctcgcgctgggcagggaaccagaccaccgagggcagcaccgttgcgccattgaccaaaggcgcaagctgggctttctgctccacgccgttttgcagcgcgcagaccacggtgttttcatcgcacagagcgcgcagccacccggcgctgtcggcattttgcgtcgttttgaccgcaaaaaacgaggtcaacggggcgcgtaatgacgctgggatcggtgagtaccggaccgggcaccacaatttcaccctcatcatgacgcaggcgcagttccggatgcgcggtgcgcccacacagcagcggcgtgcggcccgcttcatgcagcaccgcggcgatggtggtcccaatcgcaccgggtcctgtcagcgcaatggttggatagtcagacatggatcactccccttttgctaagcctgctatcagttataccaccctgaaaagagcgcgccacgcccattgtctatactcaactcataacagacaacggagtgcgccatgcctttacccgacttcaaatcctctgaaccttataccctcggcattgagctcgaactccaggtggttaacccgccgggttacgatctgagccaggactcctctgccctcatcgccgccgtcaaagacgacatcaaagggggggaagtcaaacacgacatcaccgaaagcatgctcgaaatcgccaccggcgtgtgccagaccatcgaccaggcagcggcgcagttttcagtgatgcagcagagcatcctgcgcgcggcggaagatcagcatatccagatctgcggcggtgggacgcatccgttccagaaatggcagcggcaggaagtgtgcgacgacgagcgctataacgtcacgctggagcgctttggctatctgattttgcaggcgacggtgttcggccagcacgtacacgtcggctgtcggaccggggacgacgccatttacctgctgcacggcctgtcgcgctttgtgccgcactttatcgccctggccgccgcatcaccgtatatgcagggcacggacacgaagttcgcctcatcgcgtctcaacatcttctcgggcttcccggataacggtcagatgccgtgggtcaacagctggcaggagttcgaggggctgttccgccgcctgagctccaccagcatgatcgacagcattaaggatctgcactgggacatccgccccagcccgcacttcggcaccgtcgaggtgcgggtgatggatacgccgctgacgctcagccacgccattaacatcgccgggcttattcaggcgacgtcgcactggctgctgaccgcgcggccctataagcatcaggaacgggattttctgctctatcgctttaaccgttttcaggcctgtcgctacgggctggaaggcattctgacggacgtacataccggcgagcacaaaaccgtggcagaagatatcgcctggctgctcgagcaggttgcgccgtcggccgagaagctcggcgcgacaagcgcaatcaatgagattgccctgctgttaaagcagggcaagagcgaggcgcagcgcatgcgggactttatcgccgatggcggctcgctgatttctctggtgcagaagcactgtgagctgtgggcgacgagtccgtaaggccgtggccccactcgcgcaggcgctggaacagcacgaacagcgccgggataaacactatccccaccacggtcgccaccagcatgccgctgaacaccgtagtgccgatgatgcggcggctctgggcacccgccccggtcgccagcatcatcggcaggacgccgataatgaacgacacggcggtcatcattaccgcgcggaagcggcgcgatgccccctcccgtgcggcatcgacaatcgccattccatccatgcgccgggcgcgggcaaactccacgataagaattgcgttcttggcggcgagggctatcagtagcaccagacctatctgcacgtatacgtcgttggcatagcccgtcagccacagccagaccagcgccccgccgatggcgaacagcactgagagcatcacgctcgccggcagcgtccagctctcgtactgggcgacgaggaacagccacgccatcaccaccgccgccagcacgatccatatcgcctgattgccggtctgctgctcctgatacgacatgccgctccaggcgtagtcgtacccggctggcaggttttccgccagaatctcgcccatcgccgccattgcggtgctgctgctcaccccttccgctgccgagccgctcaccgataccgacgggaactggttgtactgctgaataaatggcgcgccgacggtcggcgtgatggtgatgaggttgctcagacgcacccgctcgccgctgttgctgcgcacgaacagctcgctgatttgctccgcgcgctcgcgccactgcatctcgttctgcatcactacgtggtagacgcggttgttgacgctgaaatccccggcgcgcgtgccgccaaaggcggtttgcaggctgctgaagatgcgtgacaccggcacgtcgaggcgggccgcgcgctcgcggtcaacggtgagcgtcatctgcggtacgttgctgctccaggtggtgaacacgcggctcagctgcgggttctggttggctttcgccagcacctcacgcgtcacgcgctccagctccgccggactttgccccgcctgcgcctgaatgcgcaggtcgaagccggaggcgttgcccagccccggcagcgtcggcggcgcaaaggtcatgatggtggcttccggcagggccagcagctggcgctgaaggatgcccatcacctcatccagcggcggacgctcgctccagtctttgagcatgatggagataaacccgccgttcgatgcgctggtgccgttgaggatgttaaacccggagacctgaatcacgtcttctaccgccgggttgttagcgatcagctcgcgcgcggtggtcatcaccgcttcggtgcgctccagcgaggctgcctccggcagctggacgctggcgaagaagtagccctgatcctcctgcggcaggaagccctttggcatcgacatgaagctgaataccaccaccgccgccgcacccgcggtggccagcagcgccagccacgggcgcaggtttaaaacgttcacgatgcgggtgtagaaaccgcgcgtggcgtccagcccgtggttaaaggcgcgatagagtgccgcaggtttctccggtcgcgggcgcagcaacagcgcgcacagggcgggcgtaagagtcaacgccacgaggcttgagagcgtgacggcggtggagagcgtcaccgcgaactggcggtacagctcgcccacaatccccggcaagagcgccaccggcacaaacaccgccagcagcaccagcgtggtggcaatcactggcccagcgatctgacgcagcgccagcgcggtcgccgccgtccggctctgcccttccgccatcagcgtttcgacgctctccaccaccacgatggcgtcatccactaccatggtcagcgccagaatgatggcgaacaggctcagcgtattggcggagtagccgagcgtatagagaaccgcgaaggtgcccaccagcgacaccggaatggcaagggcaacaatcagcgtcgcgcgccagctttgcaggaacagggacaccacgaccaccaccgccagcatcgtcagcgccagcgagacgccaatctctttgatggtggcggccacaaacgaggtggtgtcgaatttgacttcatagaccagatcgtccgggaagcgcgtggataaccgttccagctccgcgcgcaccgcatcggccacgcgcagggcgttagcggacggcgtcgggtagatgccgaggtaggcggagtcgtgcccgttcagctgcgcgccagagctgtagctgcgcgagccaagctcgatggtggcgacgtccttcaggcgcaccagttgccccnnnnnnnnnnnnnnnnnnnnnnnnnnnnnnnnnnnnnnnnnnnnnnnnnnnnnnnnnnnnnnnnnnnnnnnnnnnnnnnnnnnnnnnnnnnnnnnnnnnnnnnnnnnnnnnnnnnnnnnnnnnnnnnnnnnnnnnnnnnnnnnnnnnnnnnnnnnnnnnnnnnnnnnnnnnnnnnnnnnnnnnnnnnnnnnnnnnnnnnnnnnnnnnnnnnnnnnnnnnnnnnnnnnnnnnnnnnnnnnnnnnnnnnnnnnnnnnnnnnnnnnnnnnnnnnnnnnnnnnnnnnnnnnnnnnnnnnnnnnnnnnnnnnnnnnnnnnnnnnnnnnnnnnnnnnnnnnnnnnnnnnnnnnnnnnnnnnnnnnnnnnnnnnnnnnnnnnnnnnnnnnnnnnnnnnnnnnnnnnnnnnnnnnnnnnnnnnnnnnnnnnnnnnnnnnnnnnnnnnnnnnnnnnnnnnnnnnnnnnnnnnnnnnnnnnnggtcagggtctgctgctggccgttaaacaccggcggcgtgccgacctggcctgcgccccctgcacgttctgctcgcgcagcgcctgtgccacgtcatcgctggtcacgttcagggcgttcatgcggtccgggcgcagccagatgcgcatgctgtagtcccgtgcgccaaacatctgtacctgcccgacgcccggcagacgcgacagcgcctcgcgcacctgggtgctggcgtagttgctgacgaacagcggcgtgtgggtgttgttcggtgagtaaaggcttacccccatcatcaggttggtggcgcgcttgcgcacctgcacgccgttttgctgtgcctcggtcggcagttgcgccacggcctgcgccacgcggttctgcacgtcgatggcggcgagatccgggtcggtgcctgccgcaaaggtaatgttcaggctatagctaccctcgtccgaactggtggactccatatagagcatatgatccaccccgttcagctgggtttccagcggcgtggcgatggcctccgccacgtcagccgagctggcgcccggccatgacgctgacacattcacgaccggcggggtgatctgcgggtactgctccaccggaataatcctcagcgcaatggctcccagcagagtgatgaccagcgcaatcaccatcgcaaagcgcgggcgtttgatgaaaaacgtcagcatgatggctccttaattcagtatctggacggcaacgcctggctgcacgcgctgcgcaccgtcagtaatcgctcgctcaccgggcttcaggccggaggcaatctggaactgctggccgatctgtccggcgaccttcagcggacgcatttcggctttatcttcggcgttaaccacccatgcgaagaatccgtggccattctgctgtacggcagcggcgggcagagtcagcactggttgctcacttgacggacgcaggtagacgttcacgttgccgccgggcagcagctgatggcgcgggttggcgaactcggcgcgcagcatcacgctggcggttcgcgggtcgatgcggttgtccacggaggtgagttccccgctgatgcgctggccgttgctgtcaatcagcgcctgccaggcctgcttcatggcgctgatatccgcatgctgtccggctttagtggcaaacgagccctcttccagcgcaaaggcaatgcggatgggatcgagctgcaccacctccaccagcacaccgctggcaggattcaccaggctgccgacgtgaaagttgctgtgccctatgcgtccgtcaatcggcgaggcaatgcgcgtgtagttcagggtgacgctgcgggtgtcgagacgggctttcgcctgctccagcgcggcgctggcgacgtcccgttgcatgcgggcgttatccacgtcgtgacggctgatggcgttgttgctacccaggctttcaaagcgggaaagctgctgctgcgcctgacgcagcgtggcttcggcgcttctcacctcggcctgcgccaggcgcagggcggcgcgcggctcggcgtcgtccagttcgaacaacacgtcgccttttttcacgtactgcccgtcgcggaagtggattctggtgatgacgccttccgtgcgggcgcgcagttcaacggtgtggatagcttcaatgcgacccgggatctgacgctcggcggcgtgggcggtctgctccacggtggcgacacgcacgggaatggccgcggcgaatgcgggtggcagggtgcaggtgaggagcgcgaacaggagtgggaatttcatgggagtacctcggcgttgttttccctcaccccggccttctcccacagggagagggaggtcagagttccctctccctgtgggagagggttagggcgagggcaaaaggttatgcagccttacggaacctgcgggtcagtcgcttctcgatttcgacgacgaagaacatcacgcccgccaccgccagcgtcacgaaccagtagcgcagcggcagcgcttcggtgccgaacagcatctgcataaacggcaggtagatgatcgccgcctggagcaggaacagtacgcccgttaccagccagatccctttgttcgccagcaggccgcggttcagggagaacccgtcggtattgcggcagttaatcatgtatacccactgggcgcagaccagcatctgcaacagcacggtgcggatgaactccgcgctgtggccgcgcggggccagccaggcttccagcgcaaaggcggcgatggcaatcatggtgccgacgaaggccacgcgccagacggcgtaggcgtccatcacgtgctgcccggtctgacgcggcgggcggcgcataatgttgcgctcggcggcctcgaaggccaggccgaaggagagcgtggcggaggtcgccatgttcatccacaggatcagcactggcgtcagcggaatgatgttccccgccagcagcgcaatcacaatcaatagcccctgcgccaggttggtcggcatgatgaacagaatggtcttcttcaggttgtcgtaaacgcgacgcccctcttttaccgcgctggcgatggtggcgaagttatcgtccgtcaggaccatgtccgccgcctctttggtcacttccgtgcctttgatgcccatcgcgatacccacgtccgcctggcgcagcgccggggcatcgttcacgccgtcaccggtcatgccgacgatttcgcctttgtcctgcaacgctttcaccaggcgcagcttatgctccgggctggtacgggcgaagatgtcatacttcaccgccgcttccgccagctcggcgtcgtccatcttctccagctggtagccggtaaccgcctgctcgctgttggtgatccccagcatctggccgatgctcatcgccgtctgcgggtgatccccggtgatcatcttcacgcggatccccgcctgctggcaggcgttaatcgcctcaatcgcttccggacgcggcggatccatcatcccggcaatgccgaggaagatcagaccgtggctcaggtcgtcgtgagttaatgcctgctcgccgttcgctggcttgaacgccgcggcgaccatgcgcagcccctgacgcgcatagcgctccatctccgtttcccagtacgcgcggtcaaaggcttgcgcaccgttgcgggtctgctgctgctcacacagggcgaaaatcacgtccggcgcgccggtaatcaaaatctgctcctcactgccaatctggtagtgggtgctcatgtacttgtactgagagtcgaacgggatcttgttaaccagcgtggtcacgaccggctcgaggtgggccttggccgccagcaccttcagcgcgccctcggttggccccccggtgatgccccacaggccacgctcgtcctgaatcagctggctgtcgttacacaggtcgatggtgcgcaggtactgctccagcacggtgcccggctggatctgcaccggctcgtcgctgccttcgaggtagatgttgcccaccggctcgtagctgttgccgtccacgcgatagcaggtgtcggcggtgatgatggctttcaccgtcatctcgttcatggtcagggtgccggttttatccgagcagaccacggtcatcgcgcccagggtttcaaccgtcggcagcttgcggataatcgcccgcttgcgcgccatcgcctgcacacccagggagaggataatggagataatcgctggcagaccttccggtacggaggctaccgccaggctaatcagggagagcagcagctcgcccatcgggatctcgcggaacaccaggctgaagacaaacagcgcggccatcatcgccagaatgatggcgaagatcgctttgcccagcttgtccatctgcaccagcagcggggtgcggtgtttttcaatgcccgccatcatctggttgatgtggccgagttcggtctcctggcccgtggcaatgaccacacccacgccgccgcccgcgctgaccgtcgtaccggaaaagaccaggttcgtgcggtcgcccagcggtaattcgccgttcagcgggctcgtgtgtttatccaccacggtggattcaccggtcagaattgcctcttccacgcgtaaattatgcgcttcgattaagcgcatatccgccggtatacgatctcctgcgcgcaacacaataatatcgcccgggacgatttccgtcgtcgggatagtttcatggttgccgttacgaataacgcgcgcctcgctggagagcatattgcgaatactcttcagggatttttccgcgttactttcctgaatgtggccaattaaggcattgattaccgccacgcccagaataaccagcgtatcaacccagtgtcccattactgccgttaatacggcggctgccagcaggacgtaaatcaggacatcgttaaaatgcgcgagaaaacgcagccagcccggcttgccttttttctccggcagcgcgttcgggccatgcttctgtaaacgcgcctgcgcctcggcacggtccaggccattagcctggctctgcgcctgagcaagcacctgctctacggtctgctggtacgcctgcccgcctgcgggtggcatattctgcgagaaattttttttggtcatggtatttttccttcaatatccggtggacggaagccggaattcctttctggctttaaataattcatttttaagtcttgcgggttaaattgatctaccgcaatatattgactacccggttattcaaaactgattaaaattatttcgacgcgttgatttttacaaaatatttctaaaccaacactaaacgaggaggaagcatgtttggtatttatcgcggacggcgtctggcgttatacattgtcgcagccattgttattgcgacgttaattggatatagcacctatagctttgtaaaattattttcgtgagaaagacgtttatttacataacgcgatattaatttaatcgccccgaaaatattatctattttctgttattaattcgcagaataacggtggccttttacccaattttgccagcggggatgatattgctttacgtttcaggatgccggacaatgacatttttaactgacgattaacattacgatgaaacacccgttagaatcgctgctcaccgcagggggcattttgctgatggccctgctctcctgcctgctgttacccgcgccgtcgctgggtctggtgctggcgcagaagctggttcagacctttcatatggtcgatctgaatcagctgtacaccattctgttctgtctgtggtttttggtgctcggcgccatcgaattctttatcctgcgtttcatctggcgccgctggttttcactggcgtcgtaagccagtgagatcgcgcatcccgtggatcagcgcttcacaccaggccgcgtagtcgtggccgctggatgaggggtggaagctgacgcggtagcctttattcctcagcacctgttcaaaatcctgcgtggtgcgatagatgccgccgcccggtcccgtggtttcaaacttcccggcctgtaaccagaagcgcaccggatacggtggagactgttggtactgacgcgtcagccagccgggggcgtcaccttctggagcccaccagtaagaaccggaaaggctcagcacgttgccaaacaggcgcggatagcgcagcgccacccatgaagaggcaattcccccgtagcttgatcctgccagtacggttttctgccgctgcatgccgatgcccttcccccgcagccacggcagcagctcgtgcgccataaagtcagcaaaatccgggttcggcggcagctcgttgccgcgacgggcgtgatcgaggctgtcgataaacaccacgttaatcggaggcaggtgatgtcgggcaatcagaccgtccagcacgttggcaaaatggtattcgtcctgataaacctgtccgtcgaaaaggatgagcgtccagcgtgcaggctgtgcgccgcgcggttggtagatcatcacgtcgcgggcattgccgaggatgttgctgctcagcctctggcggctcaacgtcccgtgtaacagcggctgtgccgtagcccgaacggagcagtagcgcgccgggctgagatcgagcagagaatagcgattccagcgatcggtcttctgctccccaaagctattcgggttaagcggatcggcctgcgcgcttaccaggatggcgcggcgttgatcgcgggcagagccttcaacgatcggcacatcgggggcgagcttgtactgcatcaccgtatcagcggggaccacgtagctgcggaaccagacgtcgctgttgcccaggcggaacagcggatcgtgatcccccgccggcgagccgagaatgaagacgttatcccgcgcgccgcgccacagaaaggtcacgcgcttatggctcgcatctaccggctccaccatcggcgttccctgtcgacgctgcgcctgccagaacgcctcggtacttccaccggcagaaatgacgtttgccagcgccttcagcgtcgggctttctggcgccagcatctgcacgcgtggtaacggagaggtctctttcatccgccactgaaaacgccacggcttgccagcttcgccgtgtagcaccagcgaggtgttctgtttcgccggcagggcaaacagcagcgtgtgttccccgtccgcaggaccgttttcgatcagcgtgcggatgcgacggttttgcccatccagcaggcgcgcatccgtcacgccatgcagcgtggcggaaacgtaattttcatccagctcgggcagggagaagcagacttcgccgctggcatcaaactttccctgaacatcgccctgccgggacgactgctcgcacgttgccgccacggcgggcagcgcgccgatccccaacagcaacccactccataccctcttcattaccgcttgttccccaacgaaatttgttaacaacgctaatgcaaatggtaataatttgcaatatcatcaacggcgttttaccggtgtttttatggcgatagcaaccaaggacgttcaataaaaatgtttaaaaataataagataatacagctctggctgctgagtctggcgacgaccagcgtcgcggctcaggcagaaacgaaagaagaaacgattacagtgacgcagggcgtgattgaagagcccactgcgcccgtaaaaggcattgtggcgacgaaaacgctctccgccaccaagaccagcgcggagatcgtgaagacgccgcagtcggtatcagtgatcacccgcgatcagatgaacatgcaggacgtcacctccgtttcgcaggcgctgcgctactcggcgggcgtgtttaccgagtaccggggctcgtctaaccgtaacgacgaggtgtttgtgcgcggctttagctacgtgccgaaattcctcgacggcttaagctttggcgcaacggcttcctcacagacgggcacagttgacccgtggctgctggagcgcgtggagctggtgcgcggcccggcgtcggtgctgtttggacaggtgaatccgggcggattaatcagcatgaccagcaagcgcccgacggcggaggccattcacaacgtgcagttccgcaccggcaataacgatctcgccgaaggtgcgtttgatttcggcggcaagctgagcgacgacggccgcgtgctgtatcgcgtgaacggtatcgcccgtacgcagcataatcaggtggacgattataaagagacgcggatggcgatcgccccggcgatcacctggtacccgaacgatcagacccgctttacgctgctgaccagctaccagaaagatccggatgccggataccgcaacttcctgcccgcgtatggcacggtgaaaagtgccgacgggaagtacatcccgcgcgactttaacgtcagcgatccgaattacaatcaatcctggcgcgagcagacgatgattggctacgagctggaacaccagttcgccgacaacctcaccttccgccagaacgcccgttacgccaccatcaagcagaaatatcgttatctggtttacgccaacagcacggccaacagcacggtgttgacccgtcgcgcccagcgtgaagagcgcacgaccaacgaatttggccttgataaccagctggaatatctgctggagaccggaagcgtcaaccacaccctgctcggcgggtttgattacaagaccagtaaggataaacagctgctggcgcgcgggagcggctcacagtatgacctcgactggacaaacccggtttacggcgtgaacgtggatgaaagtaccttcaaaacggccaccgacgagcagcaaaatctcgaccagatgggcctgtatcttcaggatcagatgagctggaacaactgggagtggctggtttccgggcgctacgactggagcgaagtgcgtaccaacgacttcaccgataacagctttacgcagcagaacgacagcaaatttacctggcgcactggcctgctgtacgcgtttgattctggcctgtcgccgtacatcagctacagcacctcgtttgaaccgaacctgcaaaccaaccgtgcgccgggcgtcgcgccattcaggcccactaccggggagcagaccgagattggtctgaaatatcagccggtcgacaccacgctgatgaccctggcgctgtacgatttgactcaggacaacgtagcgacctataacagcgctgaaggctggttcgaaaatgcgggcaaggtgcgttcgaaaggcgctgaagcggaaatccacgccacgctgatggataacatcaacctgattggctcctacacttacaccgatgcaaaaaccgaaagcaccacggtggcgggaactgaaggcaaaacgcctgcgcgcattccagcgcatatggcatcggcgttcgccagctataccgttccgggcggagcgctgaagagcctgaccgctggcgtggggatgcgctacatcggcaccagctacggcgatgcgaagaacaccttcaaggtgccatcggtggatctgtatgacgcgatgctgcgctacgatctgggcgagatgaaccgcagcctgaaaggggcaagcgtgcagttcaacgtcaataacgtggcagacacgaagtatgtggcgtcatgcgcaagcgatacggcgtgcttctacgggattggccggacggtgacggcgacggtgaattacagctggtaagcatggtgcggtctgatcccctcaccctaaccctctccctaaaggggagagggccggggtgaggggatgtttttcagtgcgcccgaccgtggttttctttgcgatacgccccgggcggctggttgaaggtgcgggtaaagatgcgggtaaacgtctgctgcgagtcaaacccgtagcgcaggcagatatcgtacacgcgctcgtctgactcacgcagatcgcgcgccgccatcagcagcttgcgttcgcggatgtagcgccccagactttcgcctttgtactgcataaatagccgctgtaaatgccattttgagtaacccgcatggcgggcaatctcttcgatgcgtaacggctggtgtaggttgtcatcgatccattcgacaatcgtatcaatgacctgagcggaaatcgtcatactgctctccccctctgcttctcgcttaaacattattcccaccactcgcgaaattgttgcgtggtatcactcacccgcacgggatcgcccagctccggcgtcagcagccggtagtttttatccttactggctttcgccagctggatcagtggatcgttccaggtatgtttcgccagcacaaaacgcccgttatgtcccggtacgagcgctttggcattaagatctgccgaggcctgcgccgtttccgccggatgcatatgaatgtacttccagtcctggtcgtactgcccgttttccatgatggctaagtcaactccgccaaactgctcgccaatcgccttgaagtgcgggccgtaaccggagtctccgctgtagtagacctttcgctctggggtgacaaacataaagctgccccacagggtctggttacgcttaatgccgcgcccggaaaaatggcgcgccggcagaacgtgtaccgtcagcgcatcgctgatatgcaccgactggttccagtcccgctcgtcgataatctcagggttcatcccccagtagcgcagatgcgaccccacgcccagcggcgtgaccacgcgcttaaccttcggcagcagcgccttgatggtggcgtaatccagatggtcatagtgatcgtgagagataatcagcaggtcgatctccggcatgctctccgcacgccacgggtactcccccgcaaacgctttattgaggaaggagaacggtgcggcgtagctactcagaaccggatcgatcaggatgcgtttccccgccagctgcatataccaggaggagtggccgagccacaccagcgtgtcctgttcaggcgacaggctcgccagatcggttttcaccagcggcagcggctgcgcaggacgggcgttttcggttttacgggtaaggaactgccaccacgccaccagcatattttgttgcccggtaaagcccggcgtagggagcgtgttatggaattgcccgtcgcgatagtgcggagaggcttccacttcagagagctgcgcaccctgcggtggctggccaaatccggcattcagtacaaacggtaaactggcagctgaagcaataatcatgactaacaccacgcagatgaatagaggctttttcatttcctgacccgcctacgcgccccatccgatggtttgcgcgggtgacacttgattatgagtgagtaagcactcattatagataggatgattacgccgtcaagaaggttttcgttctttgacattccgcgttgcagcgtatcaaggctcgtgtttcaatcagggcttttacaattgacgggaggaaaaatttagtggcacgtccgaagagtgaagataaaaaacaggccttactggaagcagcaacggctgcgtttgcacagtcaggtattgccgcctcaacggcgttaattgcccgtaatgcgggcgtcgctgaagggacactgtttcgctactttgctaccaaagacgatctgctgaatgccctctacctgcatctgaagcaggatctctgccagaccatgctggcgaatctcgatcgcaccatcaccgagccaaaagagcatacccgcaatatctggaacagctatgtagactggggcattcgtaaccccctggcgcatgcggctatccgccagattggcgtcagtgaaaagctgaacgccgaaaccgagcaggcggtgaaagacatgttccctgaactgcatgaactgtgtcgtcgttcgatccgcccggtgtttatgtctgacgagtttaagaccttcggtgatgcaatgttcttatcgctggctgaaaccaccatggagtttgccgcgcgcgatccgtcccgtgccgtcgattttaaagcgctgggctttgaagccatgtggcgcgggcttgctgaggaagataaccatggacagtaaatccttgcaggaacatgccagacgcgtcgcgctggagatgccttttaccgaacattgctggccgtttggcccggagtatgacgtgtttaaggtgggcgggaaaatttttatgctgatggcgaccgcacacggtcgggcccacgtcagcctgaaatccgatccggaaaaatcgctgctcaatcagcagatctaccgtggcgtggagcccggttaccatctgaataaaaaacactggatctcactttatggcacggacgacatcacgcctgaactggtcaccgacctgattacggattcgtggaatctggtcgttgataaactgccgaaaaaagatcagaagtggattcggccagcctgattgttcgtctgagacgaacagaataagcgctcgaatcgcacttatcttttcccgcttcgcgcggtaatctgctttcctttcacgcccgcccgcgggcgaatttcatcaccaggagttgttatggatattatttctgtcgccctgaaacgccactctaccaaggcgttcgacccagccaaaaaactgaccgcacaagaagcggaaaaaatcaaaacgctgctgcaatacagcccgtccagcaccaactcccagccgtggcactttattgttgccagcactgaagagggtaaagcgcgcgtggcaaaatccgcggcgggcacctatgtgtttaacgaacgcaaaatgctggatgcctctcacgtggtggtgttctgcgcgaaaaccgcgatggacgatgcctggcttgagcgcgttgtcgatcaggaagaggctgacggccgtttcgccacgccagaagcaaaagccgcgaaccacaaaggccgctgctattttgccgacatgcaccgcgtggatctgaaagatgacgaccagtggatggcgaagcaggtttacctgaacgtcggcaacttcctgctgggcgtggccgcgatgggcctggatgcggtacccatcgaagggtttgacgccgcgatcctcgacgaagagtttggcctgaaagagaaaggcttcaccagcctggtggtggtcccggtcgggcatcacagcgtggaagatttcaacgccacgctgccgaaatctcgcctgccgctgagcacgattgtgactgaatgctaagcgcttctggcacgccggctatcggcgtgcccgttttcagtaaagcgttatctgcggatgctttaccccgcacaccagcgcataacgcgttaatgtatcgagactcgcccgggtaatatttgcttccattcgtgataccgtcggtgcgctgacgcccatccgctccgccacctgggcgcgcgtcagaccagcatgattgcgccattgcgccagcatctcccgcaggcgttccttgcgctcttctgcatcaaaggaagcctggacttctgaatcgcttaacagttcagctctgagttcgtcccagtcaataatctttttgctcatccaacatctcctgttgtcgtttcagtgccagacggagttcagcagagggcgttttttgcgtcttcttgataaacacccgcagcagaaaaatggttctttcccgctgataaacgtagatcccacgagtatggatcagcccgacggttcggatttcgaacaaaccattgggtaagggtttgctgtcaggttcacgcaatactgtcgggttgttgcgtaatttatcaagctggcgaatcagcttagcctgtactcccgcaggcaatcagaggatctcctccctgactgccgcatgaacgataagtctgaacactgtatttcatccctgataatattagcatgtaaggcaatttgcattaaaggctaattttgcctttcgtgattcaccttaccagcttattccaggcaggaccggatccgcgttgattccctgaaagccccgcgcaaaaaacttatttcccctgctccgccagccacgccatcgccctctcccctgcctcatccacgggtaaatagaccagcagccgcgatccgtttcgcggcgcagagtaccagtacatctgctggagatgaaaatcccccagctcgggatgggtgaacagcttgagctggttctccacgccgcgcacgtcgttacgctggtgccacagggttttaaactcttcggacaccgcaaaaaaacgcgccagcttcgcttcccagagcgggtcgccacggtgctcagccatggccgcgcggaagtaggagacgaaaatcggcagcacgtcgtcacgtttgccgagccgcgcgcgccacgccggatgggtgaggaacaggtaaatacagttgcgatcgttccggcgggatggcgttgaaatcgacgcccatcaggtggccgaagctgtcgttccacgccacgatatcgaaattcggtttctgaatactggcaggtttcggcatcagggtatcaagcaggcggcgcgtgccttcgctgatgccctcgcagcagaccgcctgcggggcttcacccggcggcaaaccggctaacacaaacaggtgtcgggcctcggttggggtgcactgcaaggctttcgccacggccgccatcaccgcgctcgatgggttgacgtcccggccctgttccagccaggtgtaccaggtcacgccgacatccgcgagcatcgccacctcctcccggcgcaggcccggcgtgcggcggcggccgctgcgcggtaagccgagccgctgcggatcaaggctttcgcgccgggcacgcaaaaacgcgcccagctgcttgcgggtgtcatcctggagagaggtgacaggttcagacatcagcgtcataacatctcctgcatggtagtgtcagtaccagtataagcaagaactggtacccgtttatcagatggttgatgctacgactctacgctgtttgacgcaatggagtcaccatgaatacgtcagttgtttcaccgggtcgtgcgggcctgatattgctgttaaccggccagatgctgccgctgattgatacctcaatcaccaacgtggcgctggattccatcacccattcgttacacgccaccgccaccgaactggagctgatcgtcgccctctacggcgtggcctttgccgtctgcctggcccccggcagcaagctgggcgataaccttggccgccgtcgcctgtttatgtggggcgtggcgtgttttggcctggcctcgctgctgtgcggcatggcaggaaatatcgaacagttgcttggcgcgcgcattatgcagggtgcgggcgccgcgctgatcatgccgcaaattctcgcgacgttgcatgtgacgttaaaaggaacggcacacgccagagcgatcagcctgttcggggggatcggcggaattgcgtttatcgtcggccagatgggtggcggctggctggtgtcggcggacattgccgggctgggctggcgcaacgccttctttatcaacgtgccgatttgtctggtggtgctggcgctgagccgtcgctacgtgccggaaacccgccgcgacacgccgtcgcgcattgactggaccgggactgtcctgctgacggcaatactgtgctgtctgctgttcccgatggcgctcggcccgcagtggcactggtcgtggccgctgaaggctgcactgctggcgattgtgccgctggcctgtttgatggtgctgaacgcgcgcaaaaaagagcgtgagaatgcccacccgctcatcgcgccgcgcctgttgcagctgcgcagcatccgctttggcgtgctgatcgggatactctttttcagcgtctggtccgggttcatgttctgtatggcgctgaccatgcaaagcggtctggggatggcgccgtggcagtcagggaacagctttatcgcgcttggcgtcacctattttatttctgcctggttcgccccacgcctgattgcccgctacagcaccagcgccatcctgctgaccgggcttgcgattcagcttgtcggcctggtggcgctgatcgccacgttccgtcactggggaatgcagaataccgcgctgacgctggccccagccaccgggctggtgggttacgggcaggcgctgattgtaaacagcttctaccgtatcgggatgcgcgatattcagcctgacgacgcgggggccgcgagcgcgattttaagcacgctgcaacaggctgcgctggggcttggcccggccattttcggcgcgattttgctgcacgggctgcaaaatcatcacggagattatacccaggcggtcaacgtcttcctgatggtggaaacggccatgatggtggtgctggcgctggtcacgctgcgtatgcgtcatcgtctgtgtttaccggtcgtcaaggcctgtccggcgacaaaataaaactgcctgaatttgcataatagatccgcagccgccattatggggctgcatcaatacaggagacgttatgcaggaattaattgctcaggttgaagagttagggattgaaattaatcacaccacctctttagtgattatctttggtattatttttcttacggccattatcgttcattttattctgcacaaagtggtgctgcgcgcattcgagaaacgcgcccaggccagcagtcatttatggttgcagatcattacgcagaacaaattatttcaccgtctggcgtttaccctccaggggataatcgtcaacgttcaggcggttctgtggctgcaaaaaggcagcgaagcggcggaattactcaccacctgcgcgaaattgtgggtgatggtttatgccctgctctccttcttctcgttgctggacgtgattttcaatctgtcgcagaaaatggctaccgcctcgcagctgccgctgaaggggatattccagggcgttaagctggtgagtgccattctggtggggatactgattatctccctgctgatcggtcagtcacccgccattctgataagcggcctgggtgcgatggctgccgttctgatgctggtctttaaagacccgatactgggcttagtggcgggcattcagctctccgccaacgacatgctcaagctcggcgactggctggagatgccgaagtacggcgccaacggcacggtgaccgacatcggcctgaccaccgttaaagtgcgcaacttcgataacaccatcaccaccatcccgacctgggcgctggtgtccgatgcgttcatcaactggagcggcatgtccgcctccggtggtcgccgcatcaagcgtagcctgaatatcgataccaccagcattcatttcctcgacgagcaggagcagcagaaactgattcaggcgaaactgctgaagccgtatctggcggcgcgtcatgaggaaattaacctgtggaatcagcagaacggcgaaggggaatcggtattaaacctgcgcaagatgaccaatatcggcaccttccgtgcctacctgaatgaatatctgcgtaaccacccgcgcattcgcaaagatatgacgctgatggtgcgccagctcgcgccggatgccaacgggctgccgattgaaatatatgcctttaccaacacggtgatctgggcggaatacgaagatattcaggccgacatcttcgatcatattttcgcggtggtagatgaatttggcctgcgtattcaccagtcgccaaccggaaacgatattcgctcgctggctggcgtcatcgccagataatcaggagctggcgcgggaaataaagcgccagtccatcatgaccctttccgtgggcgcatccgggttgtcgatcttatttaacagcagattgaccgccttgcgcccgatatcccgcgacggctgttcaatagtggtgagtgaaatcatctccgccagctcggtgccgtcaaagccgaccaccgcgatatcttctggcacccgcagccctgcctgctgaatggcgcgcagcgcccccgccgccagcgtatcggaaacggcaaacaccgcatccggcgggtttgcttttaacagattttgcatcgccgccatgcccgcaccagagctgagctcactggcgtactccaccgcctgataatccagatcccgcaggtgtatgacgctcttatagccgcgctcgcgcagacgggcatatttgtagctgaggtcgtggttgatgagcgcaatgcgtttgcgtcccccgtcggcaagctggctgacaacgtgctgggaggcatcaacatcattaatccccacgcaggagaccgcgcccgcatcggcgtattcagcgcactgcacccacggcgcgttgccaatcagcgcggccagctccggcagtttcgagaatgcatccatggtgataatgccgtcgacgattttgccggagagcaggcttaagcccgagcgggagcgctcaatatccgagccggagttgcacagcagaatgcgatagccgttcttttctgcctcggcttcaatgcccttcaccacttcggcgcagaacgggttggcgatgttcgagaccatcaccaggatcatatagctgcgggcagtgcgcagctgacgcgccagcagattgggctgatagttactctcctggatcgcctgcaaaacgcgctcgcggtttttcgccttcacggtatcgctgttattcagtacgcgggagaccgttgccacggataccccggccagttgagcgattttctgaattgacatagcgacgatacatcctgcggttagcgttttgtgcaggctaccataaattgattgcccggcgaaccgggcaatgcgtcagtattccacgcgcacccagcgctgctgctgatgacttttcataatcgcatcaatgatatacatcacacaggcgccatcgtggaaggtggcaaactgcggattatccggcatcgcgcccgcctgcacggcacggtaaaactgcgccatcatatttttaaaggcatccggccagccttcaatgtgcccgccggggaagtgggcgctgtcggccacgtcacggttcataaggcccggatcgtcgcagagtatctggtttgccctggcgcgatggccgacccacagctgctgcgggatttcctgatcccacgccaccgactgctcgctgccgttaatttcaaaggtcaggcgattttttcgccccgcgctcacctgcgagacgctaaagctgcccttgctgccgtcgtcaaagcggaacagcaccgagccaaagtcttcggtggtgaccggtttgtcttcatactccgcctgctcgtcatgggagaaggtctgatgaccgcccgcgctggccttgcgcgtcggccagacggtggataaatcagccatcaccccggtaatacgcctgccggtcacatactgtaccgtatcgcaccagtgggagccgatgtccgccaccgcccgcgacgcgccgccgagcgcggcatccacccgccagttgtagtcggtttccagcagcatccagtcctgtaaatagctgccgtgcgaagcaaacagccgcccgaggctgcccgcacgcatcatgctcgccgcctggcgcaccatcgcaaactggcgatagacaaaactcacgccatgcaccacgcctgcctgctccgccagcgccaccagctcgcgcgcctcgtccggcgtcatgcacagcggcttttcggaaaacacgtgcttgcccgcacgcaggatctggcagttaatctccgcgtgcaggtggttcggcgtgcagttgtgcaccgcgtgcagattagggagcgcgagcagttcctccacgctggcacaggcgtgcggcacattgagctggtgcgccttttcctgcgccttaacgagcgagccgtcacagagcgcgaccacctgcacaaacccgagacgcctgagcgcctcgatatgtgccgggccaataaacccgctgccgataatcccgacgttaatcatggctgccccctgcggcgaaatcatcaaacgcccgtccggaaaccgggatgatatgacggcggataaattcactgccctcactcgcgccggtatcgccatccttcaggcagcattcccactccagcaccgcccagccgtcgtagtcgtactgggtcagcttgctgaaaatgcccttaaagtcgatctgtccgtcgccgggcgagcggaagcgtccggcgcggttgatccacggttggtagccgccgtagacgccgctgcgcccgctggggcggaactcggcgtccttcacgtggaacgctttaatgcgcgcatggtagatatcaataaaggtcagatagtccatctgctggagcagcatatggcttggatcgtagagaatattacagcgcggatggttatcgaccagcgccagaaaacgctcgaaggtgacgccgtcgtgcagatcttcccccggatgcagctcaaagcagacgtccacgccctgctcgtcgaagatatccagaatcggccgccagcgggctgccagctccccgaatgcatcctgaaaacgctgctcgttgtgcggcggccacgggtagaaaaacggccaggccagcgatccggagaaggtggcgtgtgctttcaggcctaatcgggccgaggcgaccgccgcctgcttcagcttttccgtcgcccacgcctgacgcgccgcctcgttaccccgcacggaggcaggggcgaagtggtcaaacgcctcgctgtaaaccgggtttaccgcaacaagctgcccttccagatgggtcgacagctcgctgatgaccagcccatgcgcggccagcctggcggtgatgtcgtcgcagtaggcctgactctctgcggctttctccacatcaaagatatgcggatggttgcaggggatctgcaccgctttgtaacccttccccgccgcccatcctgccagcccgtcgagcgtgttgaagggcgcttccccgccaataaactgcgacagaaaaatgcccggtcctttcattgtcctcataccacctcctgaacgttacgccttgtcatcgtcatacttaaacgtgagaaggaaaattagcgcgatcgccgcggcagccaccgccgggatccaccagaatgtgacccacgcctgcggcacggtctgtcctgccaccaggcggttgtagagcgcgccggaaatctgagagccgagcagcatgccgataccgtaggtgaacatcacgatcatgctctgcgcctggcctttgaccttttcgcccgccacgcggtcggtgtagataaagccgacgacaaagaagaaatcgtagcagacgccgtggagcagaatgccgagatacagcagaatgcgcccctcctcgctgacgcccagcgcgaacatggcataacgcacgaaccacgccagcatgccgatcagcagcatatatttcacgcccaggcggcggaacagcagagggatgaccaacatgaagacgatctcagacatctgcccgaaggacatggcggtgctgacgtcggcaatcccggcatccgccagatacgaggcggtgtaggcgtagtaggtgccgagcgggacggagatcagcatcgcgcagacggagaagacgaagaagtggcgggttttaagcagcgcgaaggcgtccgcgcagaagagatcccgcacctttaccggcaggcctttcgccggggcgggcgtgtgcggcagcgtcaggctgtagatcgccagcaacacggagctgaccgccgccacctggaagatggtgacgctggacgccacgccggtgacgccgatgaaaatgcccgccgcgatccagccgatggtgccgaacacgcgcactaccgggaaggttttatccacgttcgccagactgtgaaacgcaatgttgttggtcagcgccagcgtcggcatatagcagagcgtgtagccaaacagcaggccaatcagcagcgcgccgttctcagcaatcagcgcccccggcacgaaccagaggatcgccgcgcccgcgaggtgcatcaccgccatcaccttctgcgaggcaaagaagcggtccaccagcatcccgagcacgaacggcgaaagaatggaagcgatgggtccggcagagaacgcgtcgccaatcagcaaagacatgttgtgccgggtcatcaccaggccaagcgtgaccgaccagctaccccagataaaaaattgcagaaacatcatcagcgacagacgcggcaccagcagccggtgctgcgttatcgccttttcactactctcagttgacaccatgataagcctcacccggaaaaagtaatcgattacaaattcgttcaaatgaaaagtaatcgattacaaaacaaagatcctgtggatcaaaacagaattgggaggggagtcacgataaaggtgaaggggaggtgccgggtgacggctgcgccttacccggcctactaaataacgtccccgaacatgtaggcccggtaagcgcagcgccaccgggcgtgaaggcgggcagtgtggtgcggtctggtgccctctaccccggccctctcccacagggtagagggtgcaaactactaaaaacggcaaccaggttgccgtttttgcttttnnnnnnnnnnnnnnnnnnnnnnnnnnnnnnnnnnnnnnnnnnnnnnnnnnnnnnnnnnnnnnnnnnnnnnnnnnnnnnnnnnnnnnnnnnnnnnnnnnnnnnnnnnnnnnnnnnnnnnnnnnnnnnnnnnnnnnnnnnnnnnnnnnnnnnnnnnnnnnnnnnnnnnnnnnnnnnnnnnnnnnnnnnnnnnnnnnnnnnnnnnnnnnnnnnnnnnnnnnnnnnnnnnnnnnnnnnnnnnnnnnnnnnnnnnnnnnnnnnnnnnnnnnnnnnnnnnnnnnnnnnnnnnnnnnnnnnnnnnnnnnnnnnnnnnnnnnnnnnnnnnnnnnnnnnnnnnnnnnnnnnnnnnnnnnnnnnnnnnnnnnnnnnnnnnnnnnnnnnnnnnnnnnnnnnnnnnnnnnnnnnnnnnnnnnnnnnnnnnnnnnnnnnnnnnnnnnnnnnnnnnnnnnnnnnnnnnnnnnnnnnnnnnnnnnnnnnnnnnnnnnnnnnnnnnnnnnnnnnnnnnnnnnnnnnnnnnnnnnnnnnnnnnnnnnnnnnnnnnnnnnnnnnnnnnnnnnnnnnnnnnnnnnnnnnnnnnnnnnnnnnnnnnnnnnnnnnnnnnnnnnnnnnnnnnnnnnnnnnnnnnnnnnnnnnnnnnnnnnnnnnnnnnnnnnnnnnnnnnnnnnnnnnnnnnnnnnnnnnnnnnnnnnnnnnnnnnnnnnnnnnnnnnnnnnnnnnnnnnnnnnnnnnnnnnnnnnnnnnnnnnnnnnnnnnnnnnnnnnnnnnnnnnnnnnnnnnnnnnnnnnnnnnnnnnnnnnnnnnnnnnnnnnnnnnnnnnnnnnnnnnnnnnnnnnnnnnnnnnnnnnnnnnnnnnnnnnnnnnnnnnnnnnnnnnnnnnnnnnnnnnnnnnnnnnnnnnnnnnnnnnnnnnnnnnnnnnnnnnnnnnnnnnnnnnnnnnnnnnnnnnnnnnnnnnnnnnnnnnnnnnnnnnnnnnnnnnnnnnnnnnnnnnnnnnnnnnnnnnnnnnnnnnnnnnnnnnnnnnnnnnnnnnnnnnnnnnnnnnnnnnnnnnnnnnnnnnnnnnnnnnnnnnnnnnnnnnnnnnnnnnnnnnnnnnnnnnnnnnnnnnnnnnnnnnnnnnnnnnnnnnnnnnnnnnnnnnnnnnnnnnnnnnnnnnnnnnnnnnnnnnnnnnnnnnnnnnnnnnnnnnnnnnnnnnnnnnnnnnnnnnnnnnnnnnnctcccccggatgctgaatgttgataaacagcgtgcggttgtccggcgtaaatgcaatgccggtgatttcacatccgcgcggcccggtcagaaaacggcgatactcgttggtgcccggaatggtggcgaccatctggttattgcccatcccctcgtacgctttcttattgatggtgctggaggagacgtcggtctggatccacaggacgccctggtgatcgaacgacaacccatccgggctgccgaatgccgcgccctgcatggagcctttggccttcggatcgtcgccgtcggtacgcccggccataaccagaatatcccacttaaagcgtgcggcggcaggatcggcaccctcttcgtgccagtgcatgatgtgaccaaacacgttgttggcgcgcgggttagcggcatcgaccggtgccttcccctctttaccgcgatcgctgttgttggtgagcgtacagtagacgctgccgctggcgtgcggatcgacggcaatccactcgggacgatccattttcgttgcccccaccgcgtcggccgccaggcgggttttgatcagcagatcgccctggctttcaaacccgttgcttttatccaggccattttgcccgaagatcagcggcagccagtcgccgcttccgtcctggttgaacctggcgacgtacagcgtgccggacgtcagcagctgcatattggcttcccggttcgcgggatcgtattttttgtcggagacaaacttatagatgtactcaaacttctggtcgtcgcccatgtagaccaccacgcgattatcggcggcgagcgtgacggcggccccctcatgcttgaagcggcccagcgcggtgtgcttgcgcggggtggaggtcgggttgtagggatcgatctccaccacccagccgaaacggttgggttcgttaggggttttatcgacgctgaaccgctcatccacctcgttccagcgataggactcatcgctgtcgctgatgccgtagcgtttttccagcggattgagatcggcttttttcacaaaaatgtccgaccagttctcctcgcaggtgagataggtgccccaaggcgtgtggccgttggcgcagttctgcatggtgcccagaacgcgttccccctgcggatcggcggcggttttcattaaatcctgatgccgcgacgggccggtaagctgcatcggcgtattgacggtaatacgccgggcgaaggaagacggacgcaccacctcccagccgctgcccgtttttttcacttccaccaccgacacgcccatcgcgttctgccccttgcgggctttatcgaggctccagttcgccgtaccgtcggtaaacagcatcccgttatcgatgtattcatggttcagcgccagcaggccatgctccgggttttgcgccccctgcggcaggctaaaccacgccatgccgtcgtggtgcatgcccgcctgcacagcctgttcgtctgtggtattgctggcgtccggcttaaatgccggcatgttgtctttgattcccgtcggatcaccccagcgatagaacgggcgggcaatatagccttctggcaccctgaccgtgtcttccgtggagatgtcgatgctggtaaagcccagggaaaccgcttttgccagcgcggaaggcttcgataccgcggcaatggcattttcgggtgtgatcagatacgggaatgatacggcggcccccgctacggcccccatctggagaaaacggcggcgggagaggaacacctctgcaacctcggagaataccgggttagcgctgcggttactgatatcgtcgcgatgttcttttttaaatacagatttgaggggtctgcccatagcggcttcctgtcattggccaagaggtaaggatgtggcgaccagtgtaagaagcttttattacaattttataacacgacaacgaagggattggggcgtccctgccccggataacgaggtggaacgcttagaactcgtagccaaccgagaccttaaaggtacgcggctcgccctgagtgatgtaagtaccggaatcgtccacgcttgaccagtagttctcgttggtcacgttgtcgatgcctgcccgcacggtcatctggttttcattgtggttcaccgcgaagcgatagcgcatgcccagatccagcgtggtgtagctgtccagctttttggtgttcgcaagatcggcatactgcgtgccggagtggttaacgcgtgcggtcgccgtcaggccttcaatcggcttgatatcgtactctgcgcccagcacggcgtagaagctcggaataccgatcgcatcgttgccctgattgacgccgtttttggttttggtcagctcggcctgcaaccaggtggcgctggcattcagacgcatcccaagcattggctcgccgaagacgttcagctccacgccgcggttacgctgttctgcatccaggccgtagtgaccgctgtcgtcaaggatcgccgacggcattttgatctcaaacagcgccagggagccgcccacgcggccaaagtccgcctttacgcccacttcgttctgcttagagtgcacgataccggtgctctggccgtagttagtagcagtgttcggcgcagtttcaccgggctgtaacgcctcggtgtggttggcgtagagggaaatttcctcccacggtttatagactacgccgtaggttggcatccagcggctgccgtcgaaaccgtccgcgtcgttttccgcgccggtgattttgttgtacccgcggatgacaactttctgatgacgtgcgcctgcggtgaacagcagcttgtcgtccagtacgcccagcgtatcgctcagcagccagccctgggtacgggtgcgcccgctggtcagcggatcgctgtatttcccgcctaagccgttgaagttagtgctgtccggcatatcaacgccggtgttgtgatagatgttggtggtcgggttatctgccgccgccgacattttccacgcgattttttcgtttttggtcatcgctgaatacccgacgttgaccttgtgcgagacaaaaccggtgtcaaagttaccgcgaatgcccgccatgccgctgacggaatcgctgatgcggttggtatcaaggcggctgaccgtcgcattaccgctcttatcgaggagcttcggcgcgctgtagatcccttcttcgtgcgcgtgctgcgcgccgagaccggtatatgccgtccagctatcggtgatgtcatactcgctgcgccacatcccgaactcgttttcgatatcgctgtaggcccacttctgcgagaagttacgatcgttcttcggcggttcaggcacaaagtccaccgccgagatgttgacgctggttgggctgccgtggaaggtttttttctggtagcccaggtccagcgaggtgcggaagcggtcgcctttgtaatccaggccggtggagagcagcgtggtgcggcggcggtcgttcggcacgccggtttccccttcgcgatgcacgaggttcacgcgcgcgccaaactggtcgttatcgccaaagcgacgacccgcatccagcgtggtgccaatctgggaatccgaggtgtagtcaacgcccactttcgcctgcggggtgtcgcccgcgtgtttgggctcaaggttgatcatcccgcccacgccggagcttgcggcgccgttcatcagggagttggcccctttgaagatctcgatacggtcgaccatctgggcatccaccacctgacgcggcagcaccccggacaatccaccaaaggtcatatcgtcgccgtcaaacttcaggccgcgaatgcggaaggtttccgcgctgttgccgtaaccctgaacaaattgcacgcccgcgtcgttggcaaccacgtcagcaatggtttttgcctgctgatcttccnnnnnnnnnnnnnnnnnnnnnnnnnnnnnnnnnnnnnnnnnnnnnnnnnnnnnnnnnnnnnnnnnnnnnnnnnnnnnnnnnnnnnnnnnnnnnnnnnnnnnnnnnnnnnnnnnnnnnnnnnnnnnnnnnnnnnnnnnnnnnnnnnnnnnnnnnnnnnnnnnnnnnnnnnnnnnnnnnnnnnnnnnnnnnnnnnnnnnnnnnnnnnnnnnnnnnnnnnnnnnnnnnnnnnnnnnnnnnnnnnnnnnnnnnnnnnnnnnnnnnnnnnnnnnnnnnnnnnnnnnnnagcaatggtttttgcctgctgatcttccaccagcttcgaggtgtagctgatgatgttgaacggcacgtccatggcgttctgctgaccgagcatacccatgcgcccgccgttcgccacctggccgtcgaggaaggccggaagcagctggtcaccaccgggtttgaaatcactccccgccgtggactggaccacgatggtgtcctcttttttctcatccgccgcaaaagcggagtgtgtaaccgcgccgatggcaatcgccagcagcgttttgtgcattgtggtgttgttcataatgagctcttaacgtgcgcgcaaaaatgacccgttgtcgggccttaaaagttattaaaagaaatgcaaatgagaactatacgcattatgaatgcgtaatcaagtgtcaacgggcatctctgagcgagaagagacaagaaacaaggctggcgggaggtatggcgcgcaaccacccccgaaacaggggtggttgctaaggcattattttttcttgaaaatatcggcggtaccgtgaattttgttgttggtgttgccggaagtcagcaccagaacatcagcaccttctttatcggctttctcgatcagctcttttttcgcgtcgtctaccgagacttcattggaagtgctaaccgtaccgattttttcatactgtgattccactttctcaaactcgtttttcgtcagcagttcagccgcaaaggtattggtggtaaacagaaatgcagcgcccatcaaaatagcagtcgtttttttcataacctttttccttgagattaatcagcaactacgaaaagccccacgagtaagagtgaggtgatatgagcatggtagaggaatagcaaaattgccatagggtaagaaaaatactgttataacagtcaattgtgctgtgaaaaatgtgcgttaacgctactttcgcgaggggtatttcatggagaaaatcagcaggacgtcgcgcaggcggcaatctgtgaaatttaatggcacgccctgtaggattcgaacctacgacctacggcttagaaggccgttgctctatccaactgagctaagggcgcacggagaagagtgtacttcgcggtggtgaaacgcctggaattatacggtcaatgcgtagtgagtcaatgccttttccgccttctctggcgataatgactagctgattgtaaatacggctgttttttcaacatttatccctcttttacgggctgcgaaaaggcttagccgcttttaagtaacgcctgctgttttcctgtttacttcaccttcacactgtcctgcggtaacccggccgcctggaggctggaagtgaacaggacgacggagtgacagcgccagaccagacaggttttccctcgtgcgtgcagcacatctcaaacgatattacaggcattaagcttgaacccattgtcgccctctcatcttcgcgcacggtgggggccgaagtgctcagcgtgctgtcgccgcatcagcaaaacgaaagctttttccaggactggtccgccgcccgggcgcttatgctgctggaagcacagatcgccgcgttaaaaaaccccttcccctgtgacaaccttttcataaatttgccgataaccgttctgaccataccggaaatgttccagcgtttactgcaacttaacagcccaccgctgaacattgaactcgtggagcctgcctcgttctttacactctcagacccggcgcgtctgagggtgagttgtgcgcttcagcagttgaccgcgcgaggacaccggatctggctggatgatattgatgaagcgtcaggacaagcattttcatcctgccgcctgccattaagcggaataaaaatcgataagatcgctttctggcgtttacgtgaaacgccggcgctgacacagctggtcaccctttgttcaaaaatcgctgcgaatgtgcttattgaaggcattgaaacagaacgggaccgtacttgcgcgcttcatgctggcgcgcgcttcggtcagggatattattggccatcctggagatggcaggaggactgaacggtcatcgccaagagggaagctatgcgaatgacagtgcgccgttaccggcgtcgtcggacaggaagtgattcactgggttctacgcactcgccttttgctctcccattttttgatcgtctcgaatatttgagccagtcaatcaaccagacccgcaaaaccgatgctccctttatcattctggtcacacaggataattttttccgttccggtttactgagcgggcagtcgcccctgagcaattgctgcgactattccacgctggaagccgccctcagtgatttaaatcactggccttcatcgcgtctggtaatagacattgagagccgcgcctcgccgctcatcgacctgctggaccgattacgccgccacagcctgttcgccccctacctgacaccctacctgctcgtccgcgccgatgattatgatgctcgcctgttttgtaaagcggctggcccttttcatgtgcttgaacgccagctaacggcgctggctatgcaacaaaccttgctggaagcaccgtcacccgccggcaaccgcaaagagtggttttcacgggatgaatggccgatcttacaggcgctgtcgcaggggagctccttgcggcagatcgcgcagttacagaaccgcccctacagccgcattatttaccgtctcagctgcatcctggcgaaacttgggctgaatcatcgtcatgagttgctacatcttctcaacaacctctcagatttcacgtattaacgtattcagtaacttcttaattcctaaagacctttaggaaattacttaggatatatgttaaatttttgtgttttttaacaaaactttcgattttataactattcctaattccaggtcttaaaccatgcgaaatgctgccggtacgctcaacgagagtgattttatccatgcgttaaggttctggcgcttcagttaacaggatgataatggtgtaaaaacaagcgattcacctgtaaaagaatgcgatgagaggtgaagaaaacagcagatagtactgttctgttgttgggaacggcaatttgccaggaggcgtttgaaacggagagatgacgcacgaaatggcggatttcagggatggcaggcaggcgggatgctggttgtcacagcctgctcactgttaacattaatttaacacacagtaaaatcgtttattttttgttattacataaagatgaaagtgtgtggtaaatgcaatatcaggacatttttgctaattttaaaaagttagtgattcagatccagaacataataatcagcaatatatggatattaatttacaggcttttcggacaatacttaaacggtataataagacgtgtttgacacgcgaataagaaaaatcattttgccataaccagccttatgagataactgcgctgaggcattgatatcaccactacgtaaacaaggatgctttcgctcttcccagggacatttaccgtacaaggatctgcgcaattatccttccggcttttcgagagttttaacaaaactcagcataacgcttttaacaatctgaggcataaaaaatgaaaccggcatccgttatcattatggacgaacaccctatcgtcagaatgtcgatagaagtcctgctacagaaaaataaaaacatccaggtcaaactgaagtcaggcgacagccacgaggtgcttgactgtatacgcaaccaccccattgacctggtcattctcgatattgaaatgacgggcacggatgggttcgtattactgaaaagaatcaggaacttaaataaagacattaaggttcttttcctctcttcgaaatctgaagccttctacgcaggacgcgccatccgcgccggggcaaatggttttgtcagtaagcgaaaagatctgggggaaatttataacgcggtggaaatgatcctgacgggctattccttcttcccctcagaaacattgagttttataaaccatctgggctcgcggacgggcgccgctgtggatatgccgttatcgaatcgtgaagtgacggttctgcgatatctggcgaacggattatctaataaggagattgcggatcaattattacttagcaacaaaacaattagcgctcataagtctaatatcttttccaagctgggcgtgcaaagtatcgttgaattaattgattacgcgaaagcgcacgaattactataatcctaccctctccctgcaacatataaccgttacagggagagtggatacgattaattataattaatcatgaaagttgcatcggcgtcagcccgtcccggctgcgggttatccgccgtggcgatataattggcataaaacgacagttcggcatttccctgcgcatctaccgccaccgtctggctggcctgctgcaacgcgaggcgcgttttatcccggtcgaggatctccacggccacgttgctggccgcgctggcatcattcagcgccagcaggctgttatcatgcccgtccatcttccccgtaaatgtgaccgaagccgcccccggcggacatccggtcagcttcagggtgaacggtacaggctgcgtccggctccccgttgtgcgaagctgtttcgtgggccaggtgccgagcgtgacggttttattgctgtcgtccccctccgccacgcaggtaaaatccacgatattgccgtagagctgaatgttaatttccccaagcgccgtctctgcgtgtgcaggggagcaaagcgcaaagagcgcgacggctaaataccgcattccgtttcgcatacctgctccttagtcgtagtcgacgcgtaaatagccgcgagaggtaaaacgcccctcggcaggttttttaccggttacgctgacgggccacgcgcggatccccacctgcgcctgagcgctgtcgtccagacggaacgggattttgctggtcaggttgttgggcgtcagcggcacgccattactgttggcaatcacaaaacccacatccgcgttatcggaaaccagcgcactgcctgaaaccttctccgcttcaacacgcatcgtgagcatggcgttcgcctcgacgttggtgcatttgatgccgatggttttgctttgcgctgagatcccctccggcttattcccgatgcctgctttactgaacagggaggcgccgatgtctccgaaatcgaactccaccacattcccggcattaatttcacagctctgaggcacctgaatagtcccgctgtagctgatggtataaaccggcgtggtgagcggatccgaggaggtcgtggtgacgtaaacccggaacatggtcgcccgggggatcaccaccatattgataaagcgtcgggtcactttaagccggaagacgaggctggaatcctgtacgccaaacggtttgtttttagacacattcgggtggctccccatctgaatgtagcttttgggcggataaaacgtgccagcgtagctgtcggtgattttcatcgccccgtccagatagtcgtttagcttcagatactggtagccatcgctggtgcccgtaacagggaaatcggtaacatagctgcgcttggtggtgttcccggacgttcccttagggcagacggcgttgacgcccacccactgggacttctcgctgagcgtgacaatctgccccacctggttattggagctgttaaatttatccgtcaggtcgtaatacacctccgtcggcacgccattttcattgacgcagaccgtggcgaaggcctcagatagcggaaaaaacgccagcagggatagccccagataatggattttattcacagcggatccccttaagtgtgatcgcctgttgcaggctttgttctggcaggctgtagggcgcacgacactgggactgtttcccgtctccccactgaatcagcagttctccgctcagcggcagcccgctcaggtaaatctgaccgtcatctcccaccatgctggttacgccgctctgcgtctcacgcaccaccgccccaaacggtacaggctggttatcacgcttcacggtgagcagcgcacgcacgccgatgcgggtgtcaaaactggcgcgcaccagcgcaccgttcgtcggcacgacgctggaaacgttattttcaatgtcggtgttgttgctcatagtgttggtgtcgagcgccacgcggttgtaacggtacaccgtggcgtacggcatcaccgcatagccacgccagtctgttttgacgccggtctggttttcgacgctcacgcctgacgcgcccggcgctttgatcaagacgttggtatcgcccagcggctgactgaatgtgatgccgtctgaatgccctaccacgccgccggagagctgccagttgaggtcgtgctgatcccgggcgtagttgtagcccacgcccagcgtgccgtacgtcgcctgccagttagcgctggcgctgccgctggcaccgttattgctggtgtgaccctgcgtgacgctgtagttcaggttacgatcctggagcagcgttccgctgatcccggtctgccaactggtatcaccatcgctgttacggctggcagaggctgtggcataggcccggtcgatcgcgttatcgcgacggtagccgtgacgggtgaacaggctgaacgggacggagacgttgaacgaggcgatccggtcggttccgtcaatgccgacggccttgttccacgaccaggataaggcgtagctgacccctttcaccccgcccgcgtagccaagctgataccagacgttggattcgctggtgccccagtaactctgctggctgcccgacacgtacaccgagccgtaatcgccgagagactgggagatattgagctggaaacgcccttttttattcagcgtcaggttgtgatagctctgcacgtccggcacgccgtcatcgtcctgatcgtcgccatactggtagccttccattgtgcgccaggccacatcgtcgagggtgtagaagcctttggtcgagtagcgatagcccagcagctggaagttggtgccgaatccgttaagagattttgcgtacaggaaccgcagggactgcccttcatggcggctgtcatcggcaagctggctgcgggcatgggtgagatcaagtgaaaccgccccccagtcaccgaggtttttacccgcgccaatggcgatggcggtatagcgcgaggccagctgcgttccgccgtacagcgtatagccgtcggcaagacccgcaatcatcgtaccctgagtaaagaacggcgtgtcctgctcgctgttgccgctgcgatagtcccctgccaccagatcgtatttccagcgtccttcacgctggagcagcggaacggtggaatacgggacggtgtagcgctgctggctgccgtccttctcttccaccgtcacctccaggtcaccgcttgaggaggtcgggttaaggtcagttatcgcaaaagcccccggctgcacatagctctggtaaatcacgtatccgttctggcggatcaccactttggcaggggtgcgggcgattccgcgcacggtaggcgcgtaaccttgcaggctgtccgggtacatactgtcggacgaatagaggcgaccaccgcgaaaaccaacgctgtcgaagacatcgttaccggtgttgctgtcgccaagcaccagctcgcttttcagcgggatgatcgtacgctgcgcccaggtaccaatattttgccagctgctgtgccgctggccgttgctttcggtataacgccacgcgccgttattgcgtaatcgccaggcgccatagttcaacccgctttgcaggttcagatagtagctgtcgtcgtcgctgccccggttgccggtaaagctgtagttcagcagcgcggcggggatgccttcatcccactgttcaggtggaatatacccgcgggcgctgttttgcatcgccacctgaggcaggctgacgttcaggcgcaacgaggcgaagttgaacgccgtttcgctgcccggaatagccgtggtgagcggaacgcaggtatcgccctgcacgttgctcagttccgggaaggcggcgatattgacgccaaagcgatcgagcatcgcgcgcgtaatgcacggcgacaaaccgcccgcgaccggcggcgtgttgtcagcttgctcaaaccgcacgtcctgcgtgccgataaactcatcgttacgccagatatcgacgcgatagacgcccggtgcctgctggtggcctttttcaaaacgcgacaaatccgccacgttcgccgtgtcatcggagagaaacgccgggttaaagtagctttcgccccagccagcgagtggccagagcgttgccatcagtgccagcgcaaccgggcagtaacgccattgagtgttcatcgccctgtctctgctcacaggctgacgctacgcgccggcgtaatggcgccatagtcattcacactctgccaggagagcgtgccgctcgcagcggcaggcagcacctgctgcgccgagcttttaggagcaaccatcaggttatccagcgtctgaccgccgagcttcagattgaccagcgtgacgtaatacggcgaggcattgctcaccttaagatggttgccgacgcgctcaaagcgcagctgtgagagcgcctcttccggcggcatcgccaggttagccgggcgaacaaacagcttgatacgtgacagaatagccagttgcaggacgttgttgccgtcctgatgttttttgctgacggagggaatcgctttgacgttcatgtaaaagagtgattcgcgatcggcaggcagcgccgggcctgcgtagataatgcgcagggtgttttcgctggccggctcgctgacaaacagcggcggcgtgacggcaaaggttttttccttttgcccgttggcattttctatccacgcgttaattaaatagcgctcttgtttattgctgttggtgatcgccagcgacgtttgtttggcatcggccggataaataacgcgcgtcgcgcccagcgcaatcccgccggacgcattcgcgctggcagaaaccatcatcaaaataaaagctaaaaacagtccaggtttaatcagggtgttcatcacaaccgtacctttaataattagttcgcaggcgtcagggataaatcaacgtaaaccagacattcgactgaatagtgcctggtacaaggtgttcggaaattgcccggtagcgggcgctgaaatgaaataccagctcgcgggtgtcaatgggtaaccagctcaccgccgtcgcgttcgggatgatctgacgttgatgttcgtcaaaaagcgccagcccgacaccgctgctgaccgcattttcccccggccgcgatgtcgccaggaaaacctgcggatcttctgccggtgtcactccctggaactggatccccacggtgcgggagacgtccacgctgcaatccagcagacgtacggtgaaaggcacattaaccgtggaaaagctgccgacgccggaaaaggcgtttgtgcggtattgccccatatccacgcgcatattctggctgtccggggccacggcgcagccgccgttcaccagctctcccctgaggtgtactttgccgccgtctatgaccacggtatgtgcgtttaccgctgaggcaatcgcaagggcacacagcagtatcccagtccttgtcatccttcgctcccggtataggcgatcaaaagacctcttnnnnnnnnnnnnnnnnnnnnnnnnnnnnnnnnnnnnnnnnnnnnnnnnnnnnnnnnnnnnnnnnnnnnnnnnnnnnnnnnnnnnnnnnnnnnnnnnnnnnnnnnnnnnnnnnnnnnnnnnnnnnnnnnnnnnnnnnnnnnnnnnnnnnnnnnnnnnnnnnnnnnnnnnnnnnnnnnnnnnnnnnnnnnnnnnnnnnnnnnnnnnnnnnnnnnnnnnnnnnnnnnnnnnnnnnnnnnnnnnnnnnnnnnnnnnnnnnnnnnnnnnnnnnnnnnnnnnnnnnnnnnnnnnnnnnnnnnnnnnnnnnnnnnnnnnnnnnnnnnnnnnnnnnnnnnnnnnnnnnnnnnnnnnnnnnnnnnnnnnnnnnnnnnnnnnnnnnnnnnnnnnnnnnnnnnnnnnnnnnnnnnnnnnnnnnnnnnnnnnnnnnnnnnnnnnnnnnnnnnnnnnnnnnnnnnnnnnnncaggcattactcgtatttcattacgaatgttgcgtccgcgtttgcctggcctggctcggtggtcgccgccgtggctttatagcgcgcggtgaagttcagggtgttagtcccttcaatcaggttctgcgccgcagagaaggtggcgccgtccggggtcagcgtggaggatttgctgtcgaggatctcaatacctacgcccttcgcggagttgtcgttgttaccggagcttaccgccagcagcgttttgtcggtggcgtcgatctggccggtaaacgcgacagcagcggttttcgctaccgcaggatcgcagtcgttcagttcgatggtgaacggaatattggaggtggtgtcacccactttagtgaatttcgcggtacggtactggccaagattaaccgtctgctctgaagagtcagtattcactgaacacgcggcattcactaattcacctttaaaatgcaccgtaccaccgtttacagatacaggcgtggtagtatcttctgcgtgagcggcacccgcgaccagggccagagttgcaataacagtagaagcaatgttgctgagtttcatgtctattcctttaaaatgtaaataacccttcccgcgcatattcgggaataagaaatacgatcaattaaaaaattgaaggcttatttcggagaggacaaagtagctcaggaatttattttgtaatatgtcaaaacgctgccattttgccaggtcacatcctaatcacctctaagaaattgaccatgccgtgagaagggattttgcgggacatcgatgaaatctcgtaaagggtgactgacagcggcgctcgcttctgacaaaatacaggcaatccctcctttctaacgttacagacggaatcttctctctgatggcagcaaagattattgacggtaaaacgattgcgcagcaggtgcgctctgaggttgcggaaaaagtgaaggcgcgtaaagccgccggatttcgcgcccccgggctggccgttgtgctggttggcagcaacccggcttcgcaaatttatgtcggcagcaaacgcaaagcgtgtgaagaggtggggttcgtctcccgctcttacgatctgccggaaaccaccagcgaagcggaactgctggaactgatcgacactctgaatgccgataaagagatcgacggcatcctggttcagctgccgctgcctgcgggcattgacaacgtgaaggtgctggagcgcatcgcgccggacaaagacgttgacggtttccatccgtataacgtaggccgactgtgccagcgcgcgccgcgcctgcgtccgtgcaccccgcgcggcatcgtgacgctgctggagcgttataacatcgatacctatggcctcaacgccgtggtgattggcgcctccaacatcgtgggccgcccgatgagcatggagctgctgctggcgggctgtaccaccaccgttacccaccgcttcactaaaaacctgcgtcaccacgtcgaaaacgccgatctactgatcgttgcggtcggcaagccgggctttattccgggcgagtggatcaaagagggcgcaatcgtcgtggacgtgggtattaaccgtctggaaaacggcaaagtggtcggcgacgtggtgtatgaagatgccgcagcgcgcgcatcctatatcactccggtcccgggcggcgtaggcccgatgacggtagcaacactgattcagaataccttgcaggcgtgcgaggagtatcacgacgtagaggacgcgtaatcatggcaactttttctttaggtaaacacccgcacgttgagctgtgcgatctgctgaagctggaaggctggagcgaaagcggcgcgcaggcgaagatcgtcatcgccgacgggcaggtaaaagtagacggctcggtggaaacccgcaagcgctgcaaaattgtcgcgggtcagaccgtgagcttcgcaggacaaagcgtgaccgtgacggcctgagctgtctgatgcccggtggcgctgcgcttaccgggcctacgtactgtctccgtttgtacgccgggtaaggcgaagctgccacccggcaatttctctcacaatcccctcacacccatcacggttaattatcgatcaacttcaaataatcactattccctctggcgaaatgtgaaaattaagttgcgcgattttcagactttccccacgataagtagaacgttctactaaaacgttctacttacaataacagcgtgaaaaaagcgctactcgggggaaatcagcatgagcctgataacagggtttgttaaatcgctgtctaagttatcgatgattggtcgcgccttaatgctgccaatttcactgcttcccgctgcgggcctgctgctggccttcggcgataagttccatctgccgctgatgatgaacgccggcggggttatctttgataacctgccgatgctgttcgccatcggctctgccgtcggactggcttcggaatccggcattgccgcactctctgcggcggtctccgtgtttgtcaccaacatcaccatcagcaccgtgctgagcatcacgccggaaatggcctctcagggcggcaaatacgccatggtcgttggcattccgacgttgcagatgggcgtctttggcggcctgatctgcggtattcttgcggcctggtgttacaaccgcttccacaccatgcagctgccggagttcctcggcttcttctccggcaagcgctttgtggcgatcgcgacggcgtttctgtcgttcctgctcggcctgctgctgccgtacgtctggcagcatattcaatccgggatcgacgccctgtccgtggtggtgaacggcgataaccaggcggcctcgacctttatcttcgggctggtggagcgcgcgttgatcccgctcggcctgcaccatatctggtatccatccttctggtattcgttcggggattacactacccaggcgggtcaggtgatccacggtgaccagaccatctggttcaagatgctggaagagggagtgaaatccttcagcagcgacacctaccagaacgccgggaaattcatgcagggtgagttcccgctgatgctgttcgcactgcctgcggcgtgtctggcgatgtaccacgaagcgcacacgaagaataagaaaatcgcggccggtattctgttctctgcggccctcacctgcttcctgacgggcatcaccgagccggtagagttcacctttatcttcgtggcgccgatcctttacgtcttcaacgccatcatggcgggcctggcgtacatgaccatgtacctgctgcatgcgcacatcgccaagtcgttctcggcgggctttatcgactacctgtcgttcgggatcctgccgtcgtttaacggctatcagaccaacttcctgagcgccattatcatcggcattccgatggcattgatctactacttcaccttccgcttcgtgatccgtcgcttcgacgtgaaaacgccgggccgcaccgaagtgaccgccagcgcgaatgacaagtccgattccgaacttgccaccgaaatcatcggcctgctgggcggtgcgcagaacattgattccgtcggctcctgcatcacacgtctgcgtctggaagtggcgaagagcgaagcggtggaccgggacgggctgaacgggcttggcgcgcgcggcgtggtgttcgttggcgataacggaatacaggtgattttcggggccagagcacagtttatcgcccagaccatgtccacgatgattggcaaataataagatgcctgaaggaggcgtctcctgtacgctgggggacgtctcttatctggctgataatcgggaaatttcagggagcggttttgaagaaagtcagcattattgatgtcgcaaagcatgcgggcgtgtcggtttctaccgtttcgctggtactgcgccagaaagggaaaatctcagaggcgacgatcgggaaggtcaatgccgccatcacaacgctgggctatgttcataacgtcgccgctgccaatcttcgcgccaacacctccaacttaatcggcctgatcctgcgcgacttcagcgacagcttttccatcaaggtgatggcgagcatcgttcaggagctggagaagcagggttatatggtttttctcggtcagccgctgaacgacggcgaacatcttgagcgtaccctgctctcatttaagcagcagggcgtagcgggcgtcatctacctggcgtcggacacccgcgccgcctctctcccggaacacattcgccactgcccgctgccgcttgtggcggtttcgcagtcattgctggaagagaaatgcaacctggtgatgcgcgataaccgccaggcggcgaacctggctgcgcgttatcttatcgagcgcgggcaccgcaacatcgcctacattggcgggcgcgacgggtgccgtatccgcgagcagcgcctgcttggttttcgcagcgcgatgacgcagagcggcctggtctggcgtgaggaatattctcccgcctgcaccgatgacacgcaggcggcggccatggcgactcgtcagctgctggagaagaacaacacgattaccgccctgctctgccattcaccggacgcgatgatcggttcaatctcaggtattcaccaggtggggcgcacggtgggtaaagacgtgtttttaacccagcaggtggcgctgattggttttgaagatatgctccacgttaatctcacgtcgccgtcactgacttacgtttcgtctgccagcgaagagaccggccgccaggcggcagggctgatgatccgcaggctgaaagagccggatctgcaaacgcagcgcattaccctctccgggcagcttatcgcgcgggaatcggcgtaaaatcagaatttagcacaggtttgctgcggcggatctgctgctatattcccatgatttgccatggataaatgcaatgcctaccgttatcacccacgctgccgtacctctgtgtctgggcttagggctcggaaccaaagtcatcccaccccgcctgctgtttgccgggatcgtcctcgccatgctgcccgatgccgacgtactggcgtttaaattcggtgtcgcctacgggaatattttcggccaccgcggtttcactcattcgctactgtttgccctggtggtgccgatactctgcgtgctggcaggccgacgttggttcagggccagcctgacgcgctgctggctgtttttaaccgtgtcgctgctgtcgcacagcctgctggattcgatcaccaccggcgggaaaggcgtcggctggctgtggccgtggtcagatgagcgcttctttgcgccgtggcaggtgattaaggtcgcgccgtttgcgctgtcacgctataccacgccgtacgggcatcaggtaatcatttcagaactgctgtgggtgtggctgccggggatggtgctgatggggttgctgtggtggcgacggaggtaaaaagccgggtggcggctgcgccttacccggcctacggtcgtgattttgtaggcccggtaagcgttagcgccaccgggcgttacggacctacttacgacgccaggtggttccctgcgggccgtcttccagaataatgcccatctcggtcagacggttacgcgccgcatccgccgccgcccagtctttcgcctgacgcgcttcgagacgtgctttgatcagtgcttcaatttccgccacttcaccgtcgtccgcctgcgcgccgctttgcaggaacaggtccggctcctgctccagcaggccgagcacggaagagagcttacgcagatgagacgccagcgcattggccgccgccatatcttctgacttcaggcggttcacctcacgcgccatgtcgaacagcacggagtaggcttccggggtgttgaagtcgtcgttcatgacctcaacgaagcgggcctcgaacgcctcaccgcctgcggccggaacagatttatcggtgccgcgcaaggcggtatacagacgctccagcgcagcgcgcgcctgcttcaggttctcttcgctgtagttcagctggctgcgatagtggccagacatcaggaagtagcgcacggtttccgcgtcgtaatacttcagcacgtcgcgcacggtgaagaagttacccagcgatttcgacatcttctcgcggtcaaccatcaccatcccggagtgcatccagtagttcacgtactcgccgccgtgtgcacaggtggactgcgcgatttcgttttcatggtgcgggaacatcagatccgaaccgccgccatggatgtcgaaatggttgcccagctgcttgcagttcatcgcggaacattcaatgtgccagcccggacgcccttcgccccacggggatggccagctcggttcgcccgctttggacatcttccacagcacgaagtccatcggattacgcttcacgtcaaccacgtccacgcgcgcaccggcctggagctggtccagatcctggcgggaaagcgcaccgtaggttgggtccgttggcaccgagaacatcacgtcgccgttgtccgccacataggcgtgaccgcgctcgatcagcttttgggtgatatcaatgatttcatggatatggtgggtcgcacgcggctcgctgtccgggcgcagaatatttaaggcatcaaaatccttgtgcatttcggcgatcatgcgatccaccagcgcgacaaagctttcgccattttcattagcacgtttaatgattttgtcgtcgatgtcggtgatattgcgcacgtacttcaggttgtagcccaggaagcgcaggtagcgtgacaccacgtcgaacgcgacaaaggtacggccatggccgatatgacagagatcgtaaaccgtaataccacacacgtacatgccgacttccccggcatggataggtttaaattcctctttttggcgcgtcattgtattaaagatttttaacatcgaagattccatgtaaacacgtgtgtggattgtttgttccttataatacccatatttcggagtacggtcagcacacaatgcaaggtgatcgtgtcctgtggttatgctataacaagcccctatatgtgacccgagcacgggtcgacgcaccacaataacggaacaggatgcaaaaatggttactttccacactaatcatggcgatatcgtaatcaaaacctttgatgacaaagcgcctgaaacagttaaaaacttcctggactactgccgcgaaggtttctacaacaacactattttccaccgtgtgatcaacggctttatgatccagggcggcggtttcgagcctggcatgcgccagaaagagacgaaagaagcgatcaaaaacgaagcgaacaacggcctgaaaaacacccgtggtacgctggcaatggcccgtactcaggcgccacactctgcgaccgcacagttcttcatcaacgtagcggacaacgacttcctgaacttctctggcgaaagtctgcaaggctggggctactgcgtattcgcagaagtggttgaagggatggacgtggtcgacaagatcaaagccgtttctactggccgcagcggtatgcaccaggacgttcctaaagaagacgttgtgatcacaagcgtgaccgtcagcgagtaattcgtggcgacactctttattgcggatctgcatctgcaaacagaagaaccggcgataaccgccggttttctgcgttttttacgcggtgaagcgaaaagcgccgacgcgctgtacattctgggcgacctgtttgaggcctggataggcgacgacgatccgaacccgctgcaccgtgagatagctgcggccattaaagtgctggtggattccggcgtcccctgctatttcattcacggcaaccgtgatttcctgatcggccagcgctacgcccgcgagagcggtatgacgctgctgccggaagagcaggtgctcaacctctatggccgcaatattctgatcatgcacggcgacacgctctgcactgacgataccggctacctggcgtttcgcgccaaagttcacaccccgtggatccagaaagtgttcctcgccctgccactgtttatccgcaaccgcatcgccgccagaatgcgcgcgggcagcaaggccgccaacagcagcaaatcgatgaccatcatggacgtcaatccgcaggcggtggtgaaggtgatggagaagcatcgcgttcagtggctgatccacggccatacccatcgtcccgatgtgcattcccttatcgccaacggcgagcccgcccatcgcgtggttttaggcgcctggcacagcgaaggaacgatggtcaaagtcacgccggaaggtgtggaactgatcgccttcccgttttaacgcctccccgtcttttcgctcatttcccgaccacgcaaccgttttccttgccggtattacatgctattctctgtgccctcgaaagcagtgtgttccgcaccacaggagttttaagacgcatgtcttcccgcaataatccggcgcgtgtcgccatcgtgatggggtccaaaagcgactgggctaccatgcagttcgccgccgaaatctttgaaatcctgaatgttccgcaccacgtcgaagtggtttccgcgcaccgtacgccggataaactgttcagcttcgccgaaagcgccgaagagaacggttacgaggtgatcattgccggtgcgggcggcgcagcacatctgccgggcatgattgccgccaaaacgctggtgccggtactgggtgttcccgtgcaaagcgccgcgttaagcggggtggatagcctttactccatcgtccagatgccgcgcggtattcccgtcggtacgctggcgattggtaaagcgggtgcggcaaatgccgccctgctggccgcgcagatcctggcgacgcatgataaagagttacatcagcgtctggcggagtggcgtaaagcccagaccgatgaggtgctggataacccggatccgcggggtgcagcatgaagcaggtttgcgttcttggtaatggtcagcttggccggatgctgcgtcaggccggtgagccgctgggtattgccgtctggcccgtcgggctggatgccgagccggaagccgtgccgttccaccagagcgtgatcaccgccgaaattgaacgctggccggaaaccgccctgacccgcgagctggcgcgccataacgcctttgtgaaccgcgacgtcttcccgatcattgccgaccgtctcacgcaaaaacagcttttcgacaagctcggcctcgcgaccgcgccgtggcagctgctttccgataagcgcgagtgggatgacgtgtttgcgatgctgggagacctggcgattgtgaagcgtcgcgtcggcggctacgacggccgcgggcagtggcgcctgcgcgcgaacgacaccgccgagctgccggacgactgctacggcgagtgcattgttgagcagggcattaactttagcggtgaagtgtcgctggttggcgcgcgcgggcatgacgggcacnnnnnnnnnnnnnnnnnnnnnnnnnnnnnnnnnnnnnnnnnnnnnnnnnnnnnnnnnnnnnnnnnnnnnnnnnnnnnnnnnnnnnnnnnnnnnnnnnnnnnnnnnnnnnnnnnnnnnnnnnnnnnnnnnnnnnnnnnnnnnnnnnnnnnnnnnnnnnnnnnnnnnnnnnnnnnnnnnnnnnnnnnnnnnnnnnnnnnnnnnnnnnnnnnnnnnnnnnnnnnnnnnnnnnnnnnnnnnnnnnnnnnnnnnnnnnnnnnnnnnnnnnnnnnnnnnnnnnnnnnnnnnnnnnnnnnnnnnnnnntacccgctaacgcataacctgcatcaggacgggattctgcgcaccagcgtcgccttcccgcacgccaatgctgaccagcaggcgcaggcggaagagatgctctctgccattatgcatgagctgggctatgtgggcgtgatggcgatggagtgtttcgtcacgccgtcgggtctgctgatcaacgaacttgcgccgcgcgtgcacaacagcggccactggacgcaaaacggcgcctccatcagccagttcgagctgcacctgcgcgccatcaccgatctgccgctgccgcagccggtggtgaccagcccgtcggtgatgatcaacctgatcggcaccgatctgaactacaactggctgaagctgccgctggtgcacctgcactggtacgacaaagaggtgcgtccggggcgtaaggtcggccatctgaacctgaacgataccgacacggaccgcctgagcgccacgctggaagcgattgttcccctgctgccgccagaatatgcgagcggtattgtctgggcgcagtcaaaactgaagtaagtatccctcgccggggagttgaccttccccttccccggcgtacaatccccgcccattgctgctcagttttcttctggaaccaccatgaacgatggaacggactatcgcgcgatcctcgcgtccgatacccctttaatcgacgttcgcgcgccgatcgaatttgcccagggtgcgatgcccgccgcactcaacctgcccttaatgaacgacgacgagcgtgccgccgtcggcacctgctataaacgccagggtccggacgccgcgctggcgctcggccatagcctggtcaacggcgagacgcgcgaggcgcgcatcagcgcctggcgggaagccagccttgcccatcctgagggctacctttgctgcgcgcgcggtggccagcgctcacacatctcccaggcctggctgaaagaggcgggcatcgactacccgctgatccgcggcggctataaggccctgcgtcagacggcgattcaggtgaccattgagcagtcacaaaagccgatggtgcttatcggcggctgtaccggtaacggtaaaacgctgctggttaagcagcatgcgcagggcatcgatctggaagggctggcgcaccatcgcggctcgtcatttggtcgcacgctcaccccgcagctttcccaagcgagcttcgaaaatcaccttgcggttgagctattgaaaaaagacgccgcgcgctgggtgctggaagatgaaggccggatgattggctctaaccacctgccggagtgcctgcgcgaccgcatggctgaagcgcctgtcgtggtggtcgaggatccgtttgagatccgtcttgagcgcctgcgcgaagagtatttcgtccacatgtgggccgacttttctgccgcctgcggtgaagaggcgggctggaaagcgtacagcgaatatctgcatcacggcctgtacgccattcgtcgccgtctggggctgcaacgctttgcggaatttaccgccctgctggatgccgcgcttgtcgagcaacagcgtactggcagcactgacgcgcacttcagctggcttgtgccgttgctgaaggactattacgacccgatgtacggctatcagttggagaaaaaggcggagaagattgtgtatcgcgggacgtacgaagaaattgctgagtggctcgatcgctgaaaaaaaccgggtggcggctacgccttacccggcctacgcgtacttttgtagccccggtaagcgcagcgccaccggggaacaaaccacttagaagtcgtaacgcagacgcaccaggttcatatcgcccaggttgtcggtgctggaggtgaacacgtgttcgtgttcgaagacgttgccgaatggcttgaacgcagaaaaaagccgggtggcggctacgccttacccgacctacgcgtacttttgtagccccggtaagcgcagcgccaccggggaacaaaccacttagaagtcgtaacgcagacgcaccaggttcatatcgcccaggttgtcggtgctggaggtgaacacgtgttcgtaatccacgcggaaaccgtaatccagctggaagctgatacccacaccgttgtcgatgcgctggtagttacggccattcacgtactcaatacggtcgcccatgaagtacggctggatggatttcaccgcatactgaccaaccgggaacttgtaacccgcaaagtattcaataccccatgcatcaccggcgaagtagtcgttaacggacacttttttggtggtcaggaagttctgataccagccgccgcctgcggagaaggtccagttatccggcgtccagctcagggcggtaccaaggatattctggtcgtaggatttgctgtcgccgttgtccgggttacgcatgtccgcgcgggtgtagttccacgctgcgccccaggtcagatcggtagtcaggtgataatcgatacccagtgaaccgccgcctttacgtttgtaacgcaggccgttgcccggcaggtattcgctgtcttcaaacaggtaagaggcgtagatgtcagcatcgcccacggttttcttgtacttcagcatctggcgtgaacggtaagagccgtcatagtcgccgttgatcccgttacctggcgcctgaccaatcatgtcgtagtcccagatatcggtttttgcgcccactacgtcatagtacacgctgttctgctggccgaaggtcagcgtaccccaggtgtcgctcttcagaccggtgtagagcatacgacgagaggtgtcgtgcgcgccgtcggcgtagtgatgatcccagttgaactgcgccggaatgttccacccagctcgtagtagctgatccagctgatgtcatcgaacaggtagtaatccgcagcgaaacggaagcgggtgccgccgtcaaagccgttgcgcttgtagctgtttttgccgtcatcaccggtcatattctggaactgaggacgaatactgccgccaacggtaaagttcaggcggctcagcgggttacccgcctgcggatcctgtttcagaagggtgatttccgcctgagatgcgaaagaagccaatgccactgctgcgccgatcgttgtcgccagcgctgtttttcttatagtcattctttttccttgatagacacgctgctaaatatttagctggtgaatattaaccggaaaaattcgggctgtgtgggcggttttttaatgttttgtgctactaaatgcaggggcattaacgatttgtgccgttaagcaatgacgcaccagcagaaatgccggtgcgtcatcatcacgtcagtaaactagctgacaaactggcggaatagtgctttacctttcaacagccgggttccgagccagccgccgcacagggacagcagcacggcgccgcagacgggcagcgttaaccacagccgccagtcgggctcccacgggaagtcgaagactttgctctggagtaccgccagcgcggtttccgctccgatggccgccaccaggcccgccaccagcccgagcagggcaaattcgctccacagcgtggcgcgcagcagccgtttactggctcccagcgtgcggtagaccaccagctcctgatgacgctgacgcatgcccacctgcacctgcgccagcagcaacagcacgccgcagacggtcaccagcactaccatcacctccagcgcgcggctcacctgctccagcacctgcccgacctgtttgaggatcgcgccgatatccagcaggctcaccgtcggaaattcccggttaagctgcgtcagcatgccgttgccgttttcccagcggaagctggtgagccagctctggggctgtccgtccagcgcacccggcgggaagatgaagaagaagtttggtcgcaggctttcccagtccaccttacgcaggctggtaactttggcggtgaaatcctgggtatcaccggtgaaggtcacgctgtcgccgaggttcacgttcagccgtgttgccagcccctcctccatcgacacttcccccgctttcggcggccaggtgccggcaacgatcgggttatggtccggacgtttcgcctgccaggtcaggttgagttcgcgattgagcgattcatccttatttccctccgtcgactggccgttgatctgcgtcaggcgggcgcgcacgatcggatagaacgattccggaataatgtgatgctcagacaggaaacccttcagcggcgtcacctgttcaggagcaatgttgatcaggaaatagttcgggctttccggcggaagctgttgctgccagcgatccagcagatccccgcgcagcaccagcagaagcgccagcagcataaacgacagcgaaaatgccgagagctggctgagggtagaccacggctggtgcagcagtcggttaaccgctaaccgtatggggagtgatttaactgtcagctttctcaggacattaagcagtatccagcccactacgccgcacagcagcgccagcaccaccgcgcccgccagcaccgcccacagcagcgtactgccgcccatcagccaggccaacagcccgaccgccaccgcaataatcaccggcagatagaacttcagcggccagacgctggccaccacatcgcggcgcagcacgcgcagcggctgggtggcgagcagcagccggtacgggcgtaaccccaccagcagggagatcgtcgtcatcgcgccgatggcccacagccacggccagaggctggcaggcggtaatgcggcgggcaataccggtttgagcagcaccatcagcagcttttcaaacagcagccctatcgccccgccggtcagagccgacagcgccagcaccatcagccactggccgacaatcagcttgcgcagctgcgcgcggcccgcgccgagggttttgaggatcgccaccagatcgtaacggctgcgacagtagtgccccatcgccacggcaaccgccgcaatggcaagcagcaaggttaacagcgccgacagcagcaggaactgctgggaacgttcgagggatttgccgagcgccccgtcatcctgctccagcccgtaccagcggtgttccggcttgagctgcggcaggagccatttttcgtacgcctccagctgcgcaggcgtcccgccaaacttataccgccaggtgacacggcttcccggctggacggcgttggttttcgccacatcagcggtgttcatcagcaggcgcggcgcaagctggaacggattaaatccagagtcgggctcctgcaccacttccccggcaattttgagtgtcgcgtcgccgacgtcgatactgtcgccgggtttcaggttcagcagcgccatcagtcgcgatgccagcaggaccgtaccggccgtcggttttagccccggcgggctggtttgtaagtcaccatacatcgggtagatgtcatccacggcttttacgctggcaagctgcggcgtgtcgcccgcaaaggtcatagtctgaaaggtgatctgctcccctaccttcagcccctctttgcgcgcttcctcaatccagcccggcggcacggggcgagaactttgcagagcccggtccccggccataaattcccgactctgctggctaagccctttctccatacgatcgctgacgctgccgagcgccagcacgcaggccaccgccaggctcaacgccagccagacaatcagcagcgagggcgagcgccactcgcgccagaaccagcgggcaatcatgcttcctcctgaagaataccgttcaccagccgcaggcggcggtcgcagcgggcggccagctgcggatcgtgggtaaccagaatcagcgtggtgccgtgctcgcggttgagggaaaacagcagatcggcaatcttgtctccggttttacggtcaaggttaccagtgggttcatcggcaaacagcacttcagggcgcccgttaaacgcccgcgccagcgccacgcgctgctgctcaccgccggaaagctgtgccggaagatggtcgagacgtttgcctagccccagctgttccagcaacgccttcgcgtgatcgcggctttcacgagtattgtcaccacgcagcaggccgggcagctcaacgttttccagcgcgttcagcgtcgggatcagcatgaatgactgaaagacaaacccgatatgccgggcacgcagcgcggcgcgggcctcttcatcaagcgcgtggaggggctggccgaccaggttcacttcaccactactgccatcgtccagaccagcgagaatggccagcagtgtggacttaccggaaccggattcaccaatcagggcgatggtttcggcacgtttgacaacgagttcaactccggtgaggatggaaagctcgtgttctccctgaccgacggacttcttaagacgatgaacttcaacaatgttttccgctggcatttgcccttcctgtttttgatgctgatgaccttccgcgcggcggctgcggacacgttattgattctgggcgacagcctgagcgcgggctatcgtatggccgccagtgcggcctggcccgccctgctcaatgataaatggcagtcccgggcgtctgtcgtgaacggcagcatcagcggcgatacgtcgcagcaaggcttatcgcgcctgccagccctgcttaagcagcatcaaccgcgttgggtgctggttgaactgggcggtaatgatggtttgcgcggcttccagcctcagcaaacggagcaaacgctgcggaccattttgcagaccattaaggccgccaacgcccagccgctgctgatgcaaattcgcctgcccgccaactacggccgtcggtataatgaggcgtttagcgcgatctatcctaagcttgccaaagagtttgatattccgctgctgccatttttcatggaagaggtctatctgaaaccccagtggatgcaggatgatggcattcaccccaatcgcgatgcccagccgttcattgccgactggatggcaacccggctggctcctttagtaaaacatgactcgtcaaacagctgagaacctgacaggtaaagttatgcaaaaatcggtcttaataacaggatgttccagcggaattggccttgaaagcgcccttgaactgaaacgccaggggttttgggtactggcagcctgccgtaaacccgaggatgtcgaacgcatgcgagggctgggatttaccggcattctgctggatctcgattcgccagagagcttagagcaggccgccgatgaggttatcgccctgaccaacaaccgtctttacggtctgttcaacaatgcgggctacggcgtgtacggcccgctacagactctctcacgggaacagctggagcagcagttctccgcaaactttttcggggcgcatcagcttaccatgcgccttctccccgccatgctgccgcacggcgaagggcgcatcgtgatgacctcctcggtcatgggcctgatctccacgccggggcgcggggcttacgccgccagcaaatatgcgcttgaagcctggtccgatgcgttgcgcatggagctgcgccacagcggtattaaggtcagcctgattgaaccgggcccgatccgcacccgctttacggaaaacgttaaccagacgcaggcggacaaaccggtcgaaaaccccggcatcgcggcgcgttttacgcttgggccagaagccgtcgttgccaaagtgcgccacgcgtttgagagcgatacccctaaaatgcgctatccggtcacgctggtaacccatgccgtcggctggttgaaacgcctgctgccggggcggatgatggacaaaattttgcagggttgagttgaagcgacgacgcttacccccatgtaaagagtaaaccgataaaagagaatgccgcatgtccgtacagaatatcgtcaacataactgaagctaacctgcaacagacgctcgaacagtcaatgactaaaccggtgctgttctacttctggtctgaacgcagccaacactgcctgcaactgacgccggtcctggaaagccttgccgcgcagtacaacggtcagttcattctggcgaagctggattgtgacgccgaaccaatggtggcttcccagtttggcctgcgcgcgatcccaaccgtctacctgttccagaacggtcagccggtggatggcttccaggggccgcagccggaagaggcgatccgcgccctgctggataaagttctgccgcgcgaagaagagctgaaagcgcaggaagccatggcgctgatgcaggaaggcaagtacgacgaggcgctgccgctgttaaaagacgcgtggcagctgtcgaaccagaacagccagattggtctgctgctggcagagacccagattgcgctgcaccgccctgaagacgcggaagccgtgctgaaaacggtgccgatgcaggatcaggatacccgttatcagggtctggtggcgcagattgacctgctgaaacaggcggccgatacccctgaaattcaacagcttcagcagcaggttgcggacaacccgcaggatgccgcgctggcaagccagctggcgcttcagcttcatcaggtggggcgtaacgaagaggcgctggagctgctgtttagccatcttcagaaggacctgggcgccgcagacggacaggcgcggaagatgttccaggagatcctggccgcgctgggtaccggtgacgcgctggcgtcgaaatatcgtcgtcagctgtacgcgttgctctactagtaaaaaaatgcccggtggcgctaacgcttaccgggcctacaaaagccgatattaccccgtctttttcaactgcgtcaccaccagctggtggcgcgcgttgtaaaacttccgataggtcaggtagcaggcaatgatggtggacaggctcgccgtagagagcagcataaacgtcaccataatctggtacttaatcgcttttaccggatcgataccggcaaaaatcagccccgacatcatgcccggcaggctcaccagacccaccgttttggcggaatccaccgttgggatcagcgaagagcgaatgctgtcgcggatcaaccgcgccgaggccaccttcggcgtcgcgcccaggcttagcttctcctgaagctgctgctgttcactgctgaaccgttgccccagattgttgtagcacaacccgaccgccaccatcgcattgcccgcaatcatcccggaaatggggatcacctgcatcggcgtaaattctatcgagccggagagtaccagtaccgccagcgttaacgcggtcccggtagtgatggcgatcaacgacgaaatgaacgctttatcgatgtatttactgcgtttctgcgcgttccatgccgcgttaaagcagataaacagcaccatcaacagggtcagcacggcatgattgacgttgaagatgtatttcagcacatagccgacgatgatgagctgaatgaccgcgcgggcgatactccaaagaatatctttttccagccccagcttttcccggtagctgaccacaatcgccaccagcaccaggaccatcgacagcgccagcgattcgttggttatgttatgttcacccacggtgagcctcctccattttcccgccctgcggcctgagcgtgatgacatcatccgcatgggtaatttcatttgaatcatgcgtcacccacagcacggcaatattctgctcccgggcgtagcgatggataatgtcattgacgttgcgcttgttagcgtcatccagcgcgctggtgatttcgtccagcaacagcgccttcggcaagaattgcaggttacggatcagcgagacgcgctgcttttcccctcccgacagttcggcgatcgatttggtcagcgtctccggcgaaagcccgaaccgggtcagatcgtcggtaaactttttcggatcaggcgtttggttgcggatgtgccaggggaaaaccagattgtcgtacaccgtgtcgccaaacagggacggcgtttgcacgcagtatgacacctgctggcgatagctttccggtgaaagcgtggcgatatcttttcctgcaaacaggatggttccctccgttggactcagtagcgaagccacgattttcaggagggtgcttttgccgcagccggaggggccagttatcagtttaaattcgcccggagagagacaaaaatcaacgtgctgaaggatggtgttatcacccacacgaaagccaacatccctgatatccagaagattttttttattattcattccgattccattaaccgctgtaataagaacagcctttagcataatcctttccgctacgcagcgcgaatagccttaacctatagcaagtgttaaactttttgctcgctaattgtcacctctataactacaggaagtcagcaacatgacacatatcttttatgagttctcttccctgaagcctggtgttcctgatgtggaaacattaatggaagtcatcaattcttctgaactcacgcgttttgtcatgggtgcagaggtggtcgattttgttaagaaggcgctcatcgttaacaccacaatcggtagctttaaaaactgctattttgctttcgatgatggggcttactttctcgagtttgacggcaagggtaaatccagacgctttactgaggtgccggactggttcgtttcccccgcggaatttgcccgctcgcaatggctgattaaccatgatctggccgatgtgaaggcgacggcgtttattgacgtgttgatgtcctatccgcttaaagagcgccgggcgcactgcaatctgctgtttggtctggatctgcataaggtcaatgtggttccggcgcctacagcccctgccggaaaaatgggcaataaaaacggaaaaaccaccaagcctcgcgtcacggatctcggctcttttgagctttttaccgcgttctttgcgcgtatgaaaaccgccgtcaatgctaatgaattccctaccctacaggtgctgaccggccaggaggatcttacaaaagcgccgcacagcttaaagcaagggatcagaacctggtttaaggcgattaccggcgatctgccgccgaacaacaaacgtgtcggggcgggcaatgcggtattgttctgcgctcccgttcgcgagcagatccagcagatagaggccatcggcctggaaaaatactatcagggattatcaaaagccatcgctgacgccggggatggttttatcaccgacttcagctatacctggtctgaaaagtaacgttttgcgccccgcattccgaacggggcgttttatttctgccagtccggttcccacctctttacaggggcgaaatcctgttcgttagccgatatacttacgttcaacaaatacgcagtttttctcgttacggcatgcaaaacaggaggtttttatgctcatcgttgttcctgtccttatattcgttgcgctggttatcgtgggcgcaggcgtcaaaattgtcccgcagggttaccagtggaccgtcgaacgcttcggtcgctacaccaatactcttcagccgggtttaagcctgatcgtcccgttcatggacagaattgggcgtaagatcaatatgatggagcaggtgctggatatcccttcccaggaagtcatctccaaggataacgccaacgtcaccatcgatgcggtgtgctttattcaggtgattgatgcgccgaaagcggcctatgaggtgagcaacctggagctggcgatcgtcaacctgaccatgaccaacatccgtaccgtgcttggctcaatggagctggacgaaatgctctcccagcgcgacagcataaatacccgcctgctgcacattgtggatgaagccaccaatccgtgggggatcaaagtgacccgcattgagatccgcgacgtgcgcccaccggcagagctgattgcttccatgaacgcgcagatgaaggccgagcgtaccaagcgtgcctatattcttgaagccgaaggggtgcgtcaggctgaaatcctgaaagcggaaggggaaaaacagtcgcagatcctgaaagccgagggcgaccgtcagtctgccttcctccaggcggaagcgcgtgaacgttcggcagaagcggaagcccgcgcgacgcaaatggtctccgaggcgattgccgccggggatatccaggccgtgaactacttcgtcgcgcaaaaatataccgatgcgctgaaggagatcggctccgcgaacaacaccaaggtggtaatgatgccgctggatgccagcagtctgatgggatctatcgccggaattgccgagttgatcaaagacggcggaaacgagcgtaaaaaatgattgagctcatcgttgcacatcctcatgcgttctggctaagccttggcggtttactgctggccgccgagatgcttggcggcaacggttatctgctgtggagcggggttgccgcggtgattaccgggctggtcgtctggctgctgcctgtcggctgggagtggcagggcgcgctgtttgccgtgctgacgctgctggccgcctggctgtggtggcgctggctgaacaaacgggtgaaggcgcagaagccggtcgacgcgcacctcaaccagcgtgggcagcagatcgtgggtagacgctttacgcttgataacgcgctgatcaacggacgcggtcatatgcgcgtgggggacagttcgtggccggtggtggccgacgatgacctcagcgccggcacgcgggttgaggtcattgcggtggaaggcattaccctgcgggttaaagcctgttaggcgtgggttttacggtggcagcagccggaaagattgtcgataatcgggcactcggcgctgtcatctcccgggcaggattctgccagctgtaacagttgctcacgcatcgcctgtaattcgatgatatggcgttcgatctccgccactttttccagcgtacgttttttcacgtcggcactgtggcgtttcggatcgttaaacaggttaaccagctcgccgcactcttcaaggttaaatcctacctgtcttgcctggcgcagtaacgtcagttcatcaagatgcagctgcgtatagctgcggtagccgttctcactgcgcaacggtggcgtcaccagccctttttcctcataaaagcgaatcgctttgctggttaagccggtttttttcgcaacatcgctgatattcacatttcccccttgaccttccccttgatggaaggtttaaccttcataacagttagcgaaaagcagagtgaaggtcaacaattgaccagaacattatacgggagttttgttatgtctcacactattgacctgacactggacggcctctcctgcggccactgtgtcaaacgcgttaaagaaagcctggagcagcgtcctgacgtggaaagcgctgaggtgagtatcgatcatgccgccgtgaccggcagcgccagcgccgacgcgctgattgataccattaaacaggccggttacggggcggagttaagccacccaaaggctaaaccgctggcagagtcatcatccccgtcggaagcactgacagcggccactcctgagcttccggtagctgatgatattgatgacagccaacagctgctgatcaacggcatgagctgcgccagctgcgtctcacgggtacaaaacgccttacaggcggtaccgggcgtcgcacaggcacgggtaaacctggcggagcgtactgcgctggtgatgggcagcgcctccgccgcagagttagtgcaggccgtggagaaagcgggctacggggcagaggccatcgaagatgatgccgagcgccgcgagcgccagcaggaaacggctgtcgccactatgaagcgcttccgctggcaggcgattgtcgccctgctggtcggtattccggtgatggtgtggggcatgatgggtgacaacatgatggtcaccgctgacaaccgcaccctgtggctggtgattggtgtgattacccttgcggtgatggtgtttgctggcggacatttctataccagcgcctggaagagcctgaaaaaccgcaccgcgacgatggacacgctggtcgcgctcggtaccggcgcggcgtggctgtattcgatgagcgtgaacgtctggccgcagtggttcccgatggaggcgcgccatctctattatgaagcgagtgcgatgattatcggtctgattaacttaggccatatgctcgaagcccgcgcgcgtcagcgctcgtcgaaagcgctggaaagattactcgatttaaccccgccgacggcccgcgtggtcacggacgacggggaaaaaagcgttccgctctcagaggtacagccgggaatgacgctgcgcctgaccaccggcgaccgcgtgcccgtcgacggtgaaatcacccagggcgatgcctggctggatgaagcgatgctgaccggcgagccgataccccagcagaaatctcagggcgatgcggtgcatgcgggtacggtggtacaggacggcagcgtactgttccgcgccagcgcggtcgggagccataccacgctgtcacgcatcattcgcatggtccgccaggcgcagagcagtaagccggagattggtcagcttgccgataaaatctccgccatttttgtgccggtggtcgtcggtattgccctgctgagcgcggcgatctggtatttcttcggcccggcgccgcagattgtctacaccctggtgatcgccaccacggtgctgatcatcgcctgcccttgtgcccttggcctggccacgccgatgtcgattatctctggcgtcggacgcgccgccgaatttggcgtactggtccgtgatgctgacgccctgcaacgggcaagcacgctggacacccttgtctttgataaaaccggcacgctcaccgagggcaaaccgcaggtggtggccgtcagtaccgttggctgtacggagacggacgccctgcgccttgccgccgcgctggaacaaggttccagccacccgctggcgcgcgccatcctggagaaagccggtgatggccgtctgccgcaggtcagcaacttccgcaccctgcgcggtttaggggtcagcggtgaagccgaaggccatacgctgctgctgggcaaccaggcactgctgactgaacacggcgttgatacgtccgcgctggacgcagagctaaacgcgcaggcctctcagggcgcgacgccggttctgctggcgagggatggtcaggtggcggcgctgctggccgtgcgcgatccgttgcgccaggacagcgtggatgccttacagcgcctgcaccgcgcgggctatcgtctggtgatgttaaccggggacaatccgaccaccgccaacgccattgcgaaagaagccggtattgatgaggtgatcgcgggcgtgctgccggacggcaaagcggacgccatcaagaacctgcaaagtcagggtcgccaggtggcgatggtgggcgacggcatcaacgacgccccggcgctggcgcaggctgacgtaggcattgcgatgggcggcgggagcgatgtcgccattgaaaccgcggcgatcaccctgatgcgccacagcctgatgggggtggcggatgcgctggcgatttcgaaagccacgttgcgcaacatgaagcagaacctgctgggggccttcgtctataactcgctcggcattccgattgccgccgggattttgtggccgctgaccggcaccctgctgaacccggttgttgcgggtgcggcgatggcgctctcgtcaattaccgtggtgagcaacgctaaccgcctgctgcggtttaaaccgaaggattgaaccttgtacccgtacgcgctagcatgaacctttccgatcatggagcgcgtatgggtctgtttaatcgtctaaaaacatcgtttcgcgccctttttccccgccgttatgcctggcccggtatggatatttcgcttccgggcgggcagcatctgcacctggtgggaagcattcatatgggcacgcaggatatgtcccccctgccctccggcctgattaaactgctgaagcgcgccgacgcgctgatcgtcgaagccgatatctccggccatgaatcgccgtttgccgggctggaaagcgatcgccccctggcggaacgtcttaacgagacgcagctggctgagcttacccgtcttgcggatgagaccggcgtctcgctctcaatgctcgacactctgcccctgtggcaaattgccatggtgctacaggccacccaggcgcagcgcctggggctgcgcggcgattacggtatcgattatcaactgctgaatgcggcaagggcgcgcaacctgtccgttattgaactggaaggcacggacagccagattgcgctccttcgccagcttcccgatgacggcctgatgctactggatgataccctgacccactggcacaccaacgcgcgtctgctgcaaacgatgattggctggtggctggatgcgccgcccgcagacggtaagctggcgctaccgtcgacgttcagtgaatcgttgtatgatgtgctgatgaacgcgcgcaaccaggcgtggcgggagacgctatatgccctgcctgccggtcgttatgttgtcgcggttggcgcgttgcatttgtacggagaagggaatttgccgtcgctgctgaaataaaaaaatggccaatatctctattggcccgtcaaagaggaatttcatcgtttttattataccgaagtgaccttcggctacgccgattgtcgctcaaagtaaccatcactgccaatactattgcgcaagatggtgctattttttagacaaacgtcaggcgtatgctgctggtatgaatcgtctgtcgcaagaaggatagccatgactcccgccgttaaattactcgaaaaaaacaaaatttccttccggatccacacctacgatcacgatccgaacgaaaccaactttggtgatgaagtggtgcgcaagctggggctgaacgcggaccaggtctacaaaacgctgctggtcgcggtgaacggcgatatgaagcacctcgccgtggcagtgacgcccgtcgccggacagctggatctgaagaaagtggccaaagcgctgggagcgaaaaaggtcgatatggctgacccgatggttgcgcaacgcacaacgggttatctggtcggcgggatcagcccgctcggccagaaaaagcgtctgccgacgctgatcgatgcgccttcgcaggaatttgagacgatctatatttctggcggcaaacgcgggctggatatcgaactggccgcaggcgatctggcgaaaatgctggacgcgaaatttgcggatattgcgcgccgggagtagacgaaaaagccgggtggcggctacgccttacccggcctacatgttgctcccgtaggcccggtaagcgcagcgccaccgggcaaccaaaccctgcactactgccagctcacctcgcccttcggctcatacgtattcacgtcaatcggtgaattttgctggataaactgcttcaacacttccgcatcaataaacccggtatttacatagcccggtttgttatcgatatgcggatagccgtcgccgccggtggcgttaaagcttaacgttgccaggcggtaggttttcgccggatcaaccggttcgcctttgatcttgagatcgttaagcttgccgtccttcgcgacaaagctgacgttagcaaactgcggatacgccccggaatccggcttcatctgcgccacggcggtcaggtagtcaatcacctccttcccgctcatgtccgcatagaccaccacgttgccaaacggctgcactttgagcacgtctttataggtgatgtctccgccttcaatggaatcacgaataccgccgccgctcatcacgccgaaatccgcattcgtgcgcgccatctgcgcggccagcaccagacgccccatgttggtctgtacgaagcgaactttgctgcggtctccttccagtcgtccgttaagcgtgccaatcttcacgtccagctgcgctttccctttgctctggaacggcgtcagcagagagagcatctgctggttttcagcgatctctggcgtgtagagtacccgctcgcttttgccgtccggataggtcactttcttcttcaggttgaccgggatgagctgatagtgcaccagcttcatctcgccgttacggaattcgaaatccgcgcggccaacgtatttcccccactcgtgggcctgtacaatccagatcccgttctgacgatccggcgcacacggcgtaccgggcacataatctacctgctttttattctcagaagccatgcagaccggatcctgtgagtgaccgcccacaatcatcgccagcgagcccgcaggaaggctgcgcgccatctccacgtcgcccggcgcgttagagccgtgctgaccgttatcgtaatgccccatgtgggtggtagcgataatcacatccggtttttcattctgctgcaactcctggatcaccagcttcgcttcgtccgccggtttacggaattcgatgtcggtgaaaaattcagggttgccaattttggccgtatcgtcggtggttaagccgatgaccgcgatcttcagatcctgacgcttaaacagcgcccacggtttaaacaggcgctcgccggtgcttttctgataaatattggcggaaaggaacgggaatttggaccacttctcctgctggcgcaacacgctcagcgggttatcaaactcgtggtttccgaccgccatcgcgtcgtaaccaattaaattcatgccgcgaaaatcaggctcggcatcctgcaaatcagattccggtacgccggtattaatatccccgcccgacagcagcagcacgctgccgccctgggccgcgacctctttacgaatgccgtccaccagcgttttttgcgccgccaggccatattcaccgtattcgctgcgccagaaatggccatgatgatcgttagtatgcagaatggtaattttataggttttatctttttcatacgcctgcgcgggcaggcttgtcagcccccatgcggcgatgagcgccagcgcgacgccacgcttcattaacttcatcttctctctccctgacccatagacaaacgcaaaaattacagtgactcacaagaatagacaaataagttttcagaattgcgactttcttcaaatgtcacggacgggtatgttagtcggataataattactccctgcatctctaataacaaatcgacgtggtatttatggcaatcagtgaatcaacccagcccgtccagggcgctccggcgtcgccgccgaaatcgcgcacttcctttaaagtattaggcgcaatcagtctctctcatctgctcaacgacatgatccagtcgctgattctggcgatctacccgctgttgcagtctgagttctcattaaccttcgtgcagatcgggatgatcaccctgaccttccagctggcctcttcgctgctccagccggtggtgggctactggacggacaaatacccgatgccatggtcgctgcccattgggatgtgcttcaccctgagcgggctggtgctgctggccatggcgggcagctttgaggcggtactggttgccgcggcgctggtgggaaccggttcatcggtgttccatccggaatcgtcccgcgtggcgcgtatggcctccggcggacgccatggtctggcgcagtccctgttccaggtgggggggaactttggtagctccctcggtcctctgctggcggcggtaattatcgcgccttacggcaaaggcaacgtggcgtggtttgtgctggccgcgctgctggcgattgtcgtcctggcgcaaatcagccgctggtatgccgcgcagcatcgcgtaaataagggaaaacctgccgcgaagataaccaatccccttccgcgcaataaggtgatccttgccgtcagcgtgctgctggtgctgattttctcaaaatatttctatatggcgagcattagcagctattacaccttctatctgatgcaaaaattcggattatcggtacaaaatgcccagttccacctctttgccttcctgtttgcggtggcggcaggcacggtgattggcggccctgtgggggataaaattggacgtaaatatgtgatttggggctctatcctcggcgttgcgccgtttacgcttgttttaccgtacgcaacgctggaatggactggaatattgacggtgattattggttttatcctcgcatcggcattttcagccatcctggtctacgcgcaggagctgctgccgggacgtatcggtatggtttcaggcctcttttttggttttgcctttggcatgggtggcctgggagccgcggtgttagggatggttgcagaccacaccagtatcttcctggtttataaaatctgcgctttcctgccacttcttgggatgttgaccatattcctgcctgacaaccgtcataaagcgtgacttcacggctgccaaagttaaactttggcagccggataacctgaggccataaggctttcctctccctcccacctgcaaatttaccaaaacatgcactttttcacgcttattgcgtttttattctgatttcaacaattattcataaacataagcgtaaaaattgtcataaactattaatcggctttttggtatttgcaccaaaaatggatcacccatcgcgaaaggagacggaatgcaccacgccacaccgcttatcaccaccattgttggtggacttgtgctcgcttttatcctcggcatgattgccaataaactgcgtatttcgcccctggtaggctatttgttagcgggcgtgctggcggggccctttacgccgggttttgtggcggatactaaactggcacctgaactggcggaattgggcgtgattctgctgatgtttggcgtaggcctgcatttctcgctgaaggacctgatggcggtaaagtctatcgccataccgggagcgatcgcccagataggggtggcgacgctgctggggatggcgctttcggcggtgctgggctggtcgctgatgaccggcatcgtgtttgggctgtgtctttcaaccgccagtaccgtggtgctgctgcgcgcgcttgaagagagacagctaatagacagccagcgcgggcaaatcgcgattggctggctgattgttgaagatctggtgatggtgttgacgctggttctgctgcctgccgttgccgggatgatggaaaaagacaacgtcggttttgcctcgctggcgctggatatgagtatcaccattggtaaagtagtggcgtttatcgccatcatgatgctggtgggtcgccgtctggtgccgtggatcatgtcccgcagcgcagcgacgggttcacgcgagctgtttactctctccgtgctggcgctggcgctggggatcgcctttggcgcggttgagctgtttgacgtctcctttgcgctgggcgcgttcttcgcggggatggtgctgaacgaatccgagctgagccaccgcgcagcgcacgacaccctgccgctgcgagacgccttcgccgtgctgttctttgtctccgtcgggatgctgtttgatccgctggttctgatccagcagccgctggcggtgctgggcacgctggcgatcattatctttggtaagtccgttgccgccttcttcctggtacggatgttcggtcactcgccgcgcacggcgctgaccatcgccgccagcctggcgcagattggcgagttcgcctttattctggccggtctggggatggccctgaacctgctgccacaggcggggcaaaatctggtgctggcgggggcgatcctctccattatgctaaacccggtattgtttgccctgctggagaaatttctcgagaagaccgaaaccctcgaagagcaaaccctggaagaagcgattgaggaggagaaacagatccccgtggatatctgcaaccatgcgctgctggtcggttttggccgcgtcggcagcctgctcggtgagaagctgatggcccaggggatccccctggtggtgattgaaacctcccgcacccgcgtcgacgagcttcgcgagcgcggcatccgtgcggtgctgggcaacgctgctaacgaagagattatgaatctggcgcatctggactgcgctcgctggctgctgctcactatcccgaacggttacgaagctggcgagattgtcgccacagcccgtgaaaaatgcccgcatatcgaaatcattgcccgcgcccattatgatgacgaagtggagtacatcaccgagcgcggcgcgaatcaggtggtgatgggcgagcgtgagattgcgaatacgatgctgacaatgctgacgaaaccgccggttgaagaggcggtgacgggttaagttatgtgcggcctgatgccctcaccctgctggccctctcccacagggagagggaacaaacactaaaaacggcaaccacnnnnnnnnnnnnnnnnnnnnnnnnnnnnnnnnnnnnnnnnnnnnnnnnnnnnnnnnnnnnnnnnnnnnnnnnnnnnnnnnnnnnnnnnnnnnnnnnnnnnnnnnnnnnnnnnnnnnnnnnnnnnnnnnnnnnnnnnnnnnnnnnnnnnnnnnnnnnnnnnnnnnnnnnnnnnnnnnnnnnnnnnnnnnnnnnnnnnnnnnnnnnnnnnnnnnnnnnnnnnnnnnnnnnnnnnnnnnnnnnnnnnnnnnnnnnnnnnnnnnnnnnnnnnnnnnnnnnnnnnnnnnnnnnnnnnnnnnnnnnnnnnnnnnnnnnnnnnnnnnnnnnnnnnnnnnnnnnnnnnnnnnnnnnnnnnnnnnnnnnnnnnnnnnnnnnnnnnnnnnnnnnnnnnnnnnnnnnnnnnnnnnnnnnnnnnnnnnnnnnnnnnnnnnnnnnnnnnnnnnnnnnnnnnnnnnnnnnnnnnnnnnngtcccaatacgcctcttcgaggctgtcttcccgttccggcagcccccgcgttaagcgcggtgaatgctggttcagcacctgataactcacgcggttcgcgtacttgcacacctgcgccagcgaggaataggtcagccagttgaaggtatgtttgctggaattcggcacattggttttgtggtaggcgttggcggtgatgtcgtgcagcagtgcggccagcgcgccgtcgcccgcgccgttggtgttcatgatcttctcggggccacccatatacggtgcaatgtgggagaagatacgcagcgggttgatgcagtctttatgacgcatggcgcggctgaactcgtactggttaaattcggcgattgcgcccggcagcagcgggtgctgggttttccgcttgctctcttcttccgtaaagcccgccatgtacagcccgaccggcccggcggtgcagagcaccagatccacccagtccagcgccttatcagacgccagcagcggatcgctttcgccggtcagcgcttcggcttcttcttcattcatcgccagaatcgagacgtgttctttcaggaaggcctgccaccactccgggttgtcggcaatgacgaatttggtgcccagcgtcagaaccacaggcacgttgtatttcttcgcgtactcaattgccttcatggttgcgtccggcattggttcgcccggcttgcagcgcaccagataggaggtcaataccagcgcagacgcgcccgcgatcaccgcttccgggatactttcagcgcgcagcttgttcatatggccggggctgatggcaaaggtacgctcgccggaatcgcttatcagcgtaaagcagcggccaatcggcccgtcaacgccctgtaaatagttcagatcggtgcggctggaggtattgcacaggtagcggtaggcgtagccaccgatttcgatattgctgcacatcacgccaagcagcaccgagcggtcgtctgccaggacggagtagttgtgcatggtgttgccgatggtgccgccggcaaactggtgggtgataagattttcgcgcaccagctcctgatacagcgcttcagcaacgtcatcctcaatcaccagcgagtgcccggcgctcagaccgtaacgtgcgacaaacgcatcatccactttggcttcaatgtccaccagcgtctgatcgataccgaccacccaggcagcgctggtttcgctttcctgctgaatttgctgtaacagcggatcgcgggcatcgacggggaaatagtgtttggacttacgtttaccgggaaatttcatggtctgaactgtgcaaagaatacgggccgggaatggtagcacaaacccggcccgtaacgcgatcagcggcgggtggtgaccagtgagaccatcatgtcgatgtgttcaggggagtcgttaagcgcaggaatgtattcgtatttcgttccgcccgcctccataaagaactctttgttctggacagcaatctcttccagcgtttccagacagtccgccgagaagcccggcgacatcacctgaatgtgcttcacgcccttctcgcccagcattttaagcgtttcatcagtatacggggtgagccacggttcacggccgaagcgcgactggaaggtcatcatcaccttctcaggcggcaggccgagggcggagaccagctcgcgggtggtatcgcggcaacgctgggggtaatcatccccttcgttcgcgaaacgctgcggaataccgtgataggagagcagcagcagatccggctcgccgtgtttttcaaacgacgcgcgcgcgctgctggcaagcgcctgaatgtacagctcgttatcggcgtagtcgcggataaaggtgatacccggtatacggcggcgggtcgccagaatgcgcgccagttcgtcccagacggcagccaccgtggagcacgaatactgcggataaagggccagcaccacaatgtgttcaacgccctgcgccagcagagagtcgacggcgctttccagggacggcttaccgtagctcatgccgagcgcaacgggcatgtccggcaggcgggcggccagcgccttctcctgacgacggctgtacaccatcagcggcgagccctcttccatccacacggactgatagagctttgccacacgcggggaacgaatcggcagaatgacgccacgcagcagtggccaccacagcagtcttggggtattcacgacgcgcgtgtcgcttaaaaattgtcgcaggtagcgtttgaccgccgctggagtaggtgcttctggggtgcccagattggcaagcaggatgccggttttcgcctgactcattcacgcctcttaaccatttgataggctgtcaattgtagcggaaatgcgtttaaacgaaacccattgctgtaataggtaagatgagaatttttctcacccggggctccgggtgagagaggtgtgcttagccgaggattttttccagctctgcacgtacgtcagccacggcttttgtgccgtccactttcgcgtatttggtgttacccgcctgcgcttctttggtgtagtagccgatcagcggtgcggtcatctgatggtattccaccaggcgtttacgcacggtttcttcctgatcgtctttacgggtggtcagctcttcgccggtcacgtcgtctttgccttcaaccttaggtgggttgaatttgatgtggtaaacgcggccagaagcagcgtgtacgcgacggccaacgatacggtcaacgatcagctcgtctggtacgtcgaactccagcacgtaatccacgttgatgcccgcttctttcatggcgtcagcctgaggaatggtgcgcgggaagccgtccagcaggaaaccgttacggcagtcttcctgagcaatgcgctctttaaccagcgcgataaccagttcgtcggtcaccagtttgcctgcgtccatgatgtctttcgcttgtttacccagctcggagccagatttaacagcggcgcgcagcatgtcaccggtggagatttgcggaataccgtatttctccatgatgaactgagcctgagttcctttacccgcgcccggagcgccaagcagaataatacgcattgcgaaaatcccctcaaaagtcgattcaatttttcaaaaagcgctaaacaataccaccagaacgggtatggctcaaggaaggcgggaaggctgaaacggttaacggggggagataatttggcttcgtgcggtctggtgccctcaccctaaccctctcccacagggagagggaactctttcaccctctccctgtgggagagggccggggtgagggaagattacgccagcagcagcgcattcacacgtttaatgaacaggttaggatcttccagcgtaccgcgctcggccagcagggactgatccagcagcagttcaacccactccgcaaagcgggcgtcgtcctgggtatccgccgcgcgtttcaccagcgggtgatccggattaagctcaaagatatatttcacttccggcacggcctggcccgccgcagcgaacagtttcgccatctgggtgctcatttcgtccgcatcggtggtgacaatggctggcgtatcggtcagacggtgcgtgaagcgcacctctttcacgcggtcgcccagcagcgttttaacgcgctcaacgaacggctccagcgccttctcggcttctttcgcgctgtcgtccacttcatccgccagcttatcgatagactcgtcggctttggcaacggactggaaggatttaccgtcgaactcggtcaggtagttcatcatccactcgtcgatgcggtcagacagcagcagcacttcgatgcctttcttacgcagcagttccagatgcgggctgctcttcgctgccgcatagctgtcggcggtgatgtagtagatcttctcctgcccttctttcatgcgggagacgtactcttccagcgacacggtctgggcggaggagtcgttgtgcgtagaggcgaagcgcagcagtttagcgatagcttccacgttcgcagtatcttccgccggaccttctttcagcaccaggccaaactgtttccagaaggtctggtatttttccgcatcgtccttcgccagtttttccagcatctgcaacgcacgtttggtcagggcgttgcgcaggttacgggtgacggtgctgtcctgaaggatttcacgggagacgttcagcggcagatcgttggagtctatcaggccacgcacaaagcgcaggtagttcggcatgaactgctcggcgtcgtccatgatgaagacgcgctgcacgtacagcttcaggccgtgcttgtgatcgcggttccacatgtcccacggcgcctgcgccggaatgtacagcaggctggtgtactcctgtttcccttccacacggttgtggctccaggtcagcggatcggtgaagtcgtgggcgatgtgcttgtaaaactcgttgtactcgtcgtctttaatttcagctttattacgcgtccacagcgcctgcgccttgttgattttttcccaggaaaccacggtttcgccgtctttctcttcctgtttttcaatctcaaccggcagcgcaatatggtcggaatatttgctaatgatggagcgtacgcgccagtcgttcaggaaatcgtcttcgccttcacgcaggtgcagggtgatttcggtgccgcgatccgctttggtgatgtcatcaacggtgtattcaccttcacctttagactcccacagcacgccgttctctgcgctgtcgcccgcggcgcgggtgcgtacggtgactttatccgccacgatgaacgccgagtagaagcccacgccaaactgaccgatcagctggctgtctttcgcctggtcagagcccatggactccagaaacgctttggtgccggatttggcgatggtcccgaggtggtcgatcacctcgtcacggttcatcccgatgccgttatcggcgatggtcagggtgcggttctctttattgaacgagacgcgcacgcgcagttcgccgtcgccttcatacagatccgggttagacagcgcgcggaagcgcagcttgtccgccgcatcggaggcgttggaaatcagctcacgcaggaagatttctttgttggaatacagggaatggatcatcaggtgcagaagctgttttacttctgactggaaaccacgggtttcttgtcctttcatctaagtcgacctcaacaatgccatttaatggggttgtaaaacgttgagtgagagatggggataaggggaggaattttcaagcggaggccgcgcgcgcagcctccgtttggtcagaaaataatcttgtgacgtccggccagcgagtgtgacagcgtggtgccgtcgaccatctccagctcaccgccgaccggcacgccgtgggcgatgcggctggcgtcaacgccgtactgcgcgcacagctcggcgatgtagttggcggttgcctccccttccaccgtcgggttggtggcgaggatcacctctttgatggtttccgactccaggcgctgctccaggcggtcaagaccgatatcgtccgggccgatgccatccagcggggagagatgccccatcagcacgaaatagcggccggaaaactgcccggtttgttcgatggcgtagatgtccgccggactctccaccacgcaaatctgaccgttttcctgacgacgcgggttcgtgcagatgttacatacgtcctgctcggtaaaggtccggcaatccgcacagtggccaatttctgacatggcgcgggtcagagcctgcgccaggcgcatcccgccgctgcggtcgcgctgcaatagcgtaaacgccatacgctgcgccgacttcgggccaacgcccggcaggcagcgcagtgcttccattaactgcgtgagcagcggactggtttgcatcagaatggcatcttaaagcccggcggcagttgcataccgctggaaacagaggccattttctctttctgggtttcgtcgatacggcgagcggcatcgttaaacgcggctgcaaccagatcttccagcatctctttgtcgtcttcgagcaggctcgggtcgatttcaacgcgacggcagttatgcgcaccgttgatggtcaccttgaccagaccggcaccggattcacccgtgacttccagctgagcgatctcttcctgcatcttctgcattttttcctgcatctgctgagcctgcttcatcaggccacccagaccgccttttccaccaaacataggcttctctcttctttcacgttaaggattacaaccgtaagtcagactcacgatcaaatggggcgaatactctcttcatccagatcggcgtcgaagaaccggcgcagggtctggatgttgttatccgcaattatcgcctcgcgcgcctgcgcgagcttctcttcataaatggcctgacgccactcgagcggcgttttcaccgccggattatcatcttcaatgatagtcaattcaactggtacaccctgtaatgcggtaagcgcctcggccagcgccttttgcgcgccaggggaattcaggtggcgttgacccggacgcaggtgcaaacgcacctgattgccgtcctgctctttccaggcattcagcgcgacctgctccaccagcttcggcagttgcagtttgctgacctnnnnnnnnnnnnnnnnnnnnnnnnnnnnnnnnnnnnnnnnnnnnnnnnnnnnnnnnnnnnnnnnnnnnnnnnnnnnnnnnnnnnnnnnnnnnnnnnnnnnnnnnnnnnnnnnnnnnnnnnnnnnnnnnnnnnnnnnnnnnnnnnnnnnnnnnnnnnnnnnnnnnnnnnnnnnnnnnnnnnnnnnnnnnnnnnnnnnnnnnnnnnnnnnnnnnnnnnnnnnnnnnnnnnnnnnnnnnnnnnnnnnnnnnnnnnnnnnnnnnnnnnnnnnnnnnnnnnnnnnnnnnnnnnnnnnnnnnnnnnnnnnnnnnnnnnnnnnnnnnnnnnnnnnnnnnnnnnnnnnnnnnnnnnnnnnnnnnnnnnnnnnnnnnnnnnnnnnnnnnnnnnnnnnnnnnnnnnnnnnnnnnnnnnnnnnnnnnnnnnnnnnnnnnnnnnnnnnnnnnnnnnnnnnnnnnnnnnnnnnnnnnnnnnnnnnnnnnnntcatgctccagcgcctttttcagcgcttttggcgtggcgaccacttccttgaccgtttcaacaacggtggtcgccttccagcggtatgcctcttctttcgccggggctttttgctcgagcgcggacggtgccggacgcgactgcacgcgctccgttaccgaggccagtcgttcaagcgcggcgttgttcaccggccgcgctcttgcaggcgctgccggttcactcttttttggtttggttgctccctgcgcacgttgcaactggcttcgtgcggcaagcaccgaactggtggcatccgacagcggcacgttttgcggcggcggcgatgccggttgcggtggcacctgctgcggtgacattaccgcggtcggcgctaccggcgcaaaggactgccggggcgtttccggctccggcagtggcttgcgcggatggaaggccagcgcgcgcagcagcgtcatttcaacgcccatccggcgatccggtgcaaacggcagctctttgcggccaatcagcagcgtctgataataaagctgaacgtcagccggcggcacggtgcgcgcaagttcacgcatccgctgttcaatggtcgccatgtccgcgccaatggccgacggagacagttgcagcatcgccacgcggtgcagcaggctgagcatctcgaccagcagcgcttcccactcaatgccacgggcagcggcgtcgttgacgagggtcattacccgctcaccgttggcggcaatcatcgcttcaataagcgacagcgcctgatcgtcatccagcgtgccgagcatagtactgaccgcgtcggtggagagtttaccgtcaccgctggcaatcgcctgatcggtcaggctcaacgcatcgcgcaggctgccgtccgcggcacgggccagcagttgcagcgcacgcggctcgtggacaatgttctcttcatcgaggatatgctcaagctgagcgcggatctgctcaacgtcgagcgccttcagatggaattgcaggcagcgcgagaggatcgtgaccggcagcttttgcggatcggtggtcgccagcaggaatttgacatgcgcaggcggctcttccagcgttttcagcagggcgttgaagctgtggcgcgacagcatgtgcacttcatcgatcagatagaccttgaagcggccacgcgccggggcgtactgcacgttgtcgagcagatcgcgggtgtcttccactttggtgcgcgaggcggcgtcgatctcaatcagatcgacaaaacgcccctgctcgatctcacgacagttgtcgcacacgccgcacggggtggcggtgatcccggtttcgcagttcagaccttttgccagcagacgggcaatagaggttttaccgacgccgcgggtgccggagaaaagataggcgtgatggatgcgacctagcgacaagccgttcgccagggccgtcagcacatgttcctgaccgacaacgtcagcaaaggtttgtggtcgccatttacgggctaacacctgataactcatgggcaggctctgcaacgctggaaggtgaattaatggaggggaatgctatcacaacctcacccattgagcgaggttgtgagatacgggattaatgtcccgggaatggcaccaggctgtagctggtaataccctgtttttccaggcgctgctcgccgccgagatcgaacaggttgatgatgaatgccgcgtcggtcacttccccgcccagacgacggatcagcttcacggtcgcttcgatggtgccgccggttgccagcagatcgtccaccaccagcactttgtcgcctggcttgatggcatcaacgtgaatttccagctgatcggtgccgtattccagctcatagctctcagcaatggtttcacgcggcagtttgcgcggtttacgcaccggcacaaaacccacgcccatcgccagcgcaaccggtgcgccaaacaggaagccacgggcttcagtacctactactttggtgatcccggcgtttttataacgctcaaccagcagttcaatgctgagggcgtacgctttcgggtcttccagcaagctggtgacatcgcggaaaagaatgccaggttttggatagtcctggatacttttgatgctatttttcagatattcaagctgctgtgcagttgcggtcatcggtttgtgcctaaatgaaacagtgttactcacggcgcgcgacgagtcggtcaaagtaacagttgtttaacctttgaccaggcgcacctgtgctcgaaaacggtcgaatttactggctgtgcgccataattgcaaccgccatgatgaggcttcagtgcttttgttgcttttcatcaaccacggggatccgccacataaagatcagcaggcagaccaggatcgccagcagcagaatgcgcacccacatcattttcaccagccataacgagacggcgaaggtgatcaggatgaaggcaatggcgcgcggcttagccccgggcggcatggcccggtgtttttgccagtgccgcaggtagccgccaaaccacgagcggtacagaagccagtggtgaaaacgcggcgacgagcgggcgaagcaccaggcggccaacaggataaacggggtggtcggcagcaagggcaaaaccacacccagcgtgcccagcactaccgcgagccagccaatgatgattaaaatagtacgctgcataatgcgaatcgttatcaaactgaacggctactttaccactggagagcgccttgaaaacagcactgcttcttgagaggctgcaaaatcagctgatcgcgctgcgggcgcaggccacgccgttgatgggccacgccacgctgaaaccgcgctttgaccgacagctcttccgcacccgcagcaccgtcattgaggattatcttgctgaagcgcagaccaatctcgacgagcttcgtcacgcggttgagagtgaacagcaggaacaggtcgcgtggcttgcggagcatcttaccgagcagatcaccgccctgcaccgggaaatcgccgcctggccgttacgggcgtgggacagcgcctcgccggggctcggtaaatggcagcgcaagcggctggagaaccaggagtttgagcgccgtctgtttgagatgaagcgcgagcgcgaagcccgcctgaacaccagcgaaacgctggaagagcagcagttattaatgcgtgaaatcagcgcgctggaaggccgcatcgtccgctgccgtcaggcgctggatgagattgaacgcgtcattgaacgcctgacccgttaacaggagccactgatgtcactggaaaatgcccccgacgaggtcaagctggccgtcgatttaattatgctgctggaaaatcacgagatcccggcggagacggtgctgaaagcgctggagattgtgcgacgagattttgaggggaaacttccccctcaccctaccctctccccannnnnnnnnnnnnnnnnnnnnnnnnnnnnnnnnnnnnnnnnnnnnnnnnnnnnnnnnnnnnnnnnnnnnnnnnnnnnnnnnnnnnnnnnnnnnnnnnnnnnnnnnnnnnnnnnnnnnnnnnnnnnnnnnnnnnnnnnnnnnnnnnnnnnnnnnnnnnnnnnnnnnnnnnnnnnnnnnnnnnnnnnnnnnnnnnnnnnnnnnnnnnnnnnnnnnnnnnnnnnnnnnnnnnnnnnnnnnnnnnnnnnnnnnnnnnnnnnnnnnnnnnnnnnnnnnnnnnnnnnnnnnnnnnnnnnnnnnnnnnnnnnnnnnnnnnnnnnnnnnnnnnnnnnnnnnnnnnnnnnnnnnnnnnnnnnnnnnnnnnnnnnnnnnnnnnnnnnnnnnnnnnnnnnnnnnnnnnnnnnnnnnnnnnnnnnnnnnnnnnnnnnnnnnnnnnnnnnnnnnnnnnnnnnnnnnnnnnnnnnnnnnnnnnnnnnnnnnnnnnnnnnnnnnnnnnnnnnnnnnnnnnnnnnnnnnnnnnnnnnnnnnnnnnnnnnnnnnnnnnnnnnnnnnnnnnnnnnnnnnnnnnnnnnnnnnnnnnnnnnnnnnnnnnnnnnnnnnnnnnnnnnnnnnnnnnnnnnntagggtccgtcccccttaatctcgcgcttcacttccgtatgctcatcgcctttctcgttgcgcagatgaacctcaagctggttaaaggcgatattaatatcgttttcacgacacagacggtcaatggtgcggttcagctcatcgacggtgtagctgcgatcgcgcagttcgcgtacgtacaggcgcagctcatgatccaaagtgctcggcccgaaggtggtgaagaataccgctggcgcaggatcgtgcatcacttttggatggtcagctgccgccttcagcagtacctctttcaccttgtccagatccgagccataggccaccccgagtcggatcaccacgcgagtggtggtatccgagagcgaccagttgatcagacgctcggtcacaaacgctttgttcgggatgatcacctctttacgatcgaagtcggtaatggtggtcgcacgaatgcggatcttgctgacggtcccggagaaagtaccgatggtgacggtatcgccgatacgcaccggacgttcgaacaggataatcaggccagagacaaagttaccgaagatctcctgcaagccgaagcccagacccaccgacaacgccgccgccagccactggagtttatcccacgagacgcccagcgagccgaataccgtcatcgccccgacaataataatgacatagttcaggatggtggtaatggcgtacgacgccccctgacgcaggttcagccttgagagcaccagcacttccagcagacccggcaggttgcggatcaacgcccaggcaaccactgacgacaccagcgcaaagagcaggctgcccatggtgacgcttttcattaccgcagcgcccgcttcggtaccgttgtattgccagagcgtgatactgtcgaggtaggcgaagacggtaattaaatcagaccagatggcccagaacatcaccgcaaacagggcgatcatcaccagcatggtaatacgcatcgtttgctggttaacctgctccagagcaatggtcggctcttcctgcggctctgccccttcagccccctctttcacctgatgctgccgacgggcaacagcacgacgataagcaatgcggcgcgccgccacgctcaaaccacgcagcacggtctggaacagcaggttccatacaatcaccagataaaccgtttcgatccagcggccggaaagacgcagcgtggtatagaagtaacccgtcgccgtcagcaccatcagcgccagaggaatgatcgccagtaccgttacggtagccagacgaagattgtgggactctttatcccgccagctgtcgcggcacattggccacatcagaacggcaatcagcagcaggttcagcataatcaccagttgccccagcacgtcatccatcaggtgcagtggggaaagctccgccacaactgaccagaagtgcagcggcagcagcgcgaggctgatgcgcacaatctggcgacgccagtggctggtgagtttttccggcatgttgaagtggcggacggcgacgccatctttttccagcactttccagcacagaccaaacaccagccagaacagcgccagcttcttgctgaacgcccacagcagatcgctgatattcagctgcatggtcagcaggatcaggcccacggcgagtatcaacaggcagaccggcagagcacggatcagatcgatcaggatcgctttcggggtgtgcagctggctgtcgttacgcagttgccccacttccgaggccagcttcgcctggtactgtttcagccatttcaaacgccagcgtatgacgccagcgatgagcagcaaaggcagccccgtcaggaaggcaatcatcaccgcaggccaggctttctcccagttcacggtaattttcatgcttttgatctgggatttcagcgtttccgggaaagatttaaaccagtcccagtccatgggtttattgctgttcacccagaaaatctgctgggtcaggatctcctggaggcttttagaaacgctcaccagctgctgctggttgatttgcaggttaatcgccatcatcagctggttgcccagctgcttgttaagctgatcgagcaattcgcggcgcatgtccaccacctgcaacagcgcgtcgtgaacttcagcgttcacttcacctgaatggccctcttccactttggcaacgaaggtatcgctctgaaatagcgcatcgcgctgctggttaacgtcaaactgttcaagacgcaaatccgcaatgcggttggtcatgtcttccagctcgtcggcggaaggcagcgtctgctgttgctggtagagaatgcgcgacagcagcaggctgcccttcaggacggcaatctgctccttgacgttgcgctcggcctgcaaagcgcgatccagccagtttttgaccttaatattttgctgcaccagcgcgctgccgttttcagtcgcctgaatcagacgctcgctcagctggtggttaatctccagctcctgcttcaccagcgggttggcctgaatacgggccgtctcgtctggcgaaaccgcttcctgcgccgttttttcagtcagcgtcaggcgcttgctgttcaccgcttcctgcaacagctgaagctgatgctcaagccggttgatattcgcggtcacgtagtcacgctgtttttgcagcgcatcctgtagcaccgtgttgccttccagactcttacgctgctgttcaatctccgcgtttagcagcgtctgctggatgttcagcagcgtttgctgggtgggacgaagcgccccttcccccacggtgatgccattcagacggttacgtatctgctgtagctgttgcgacgccgagtacatagcgttctgcacgcgctcaggctgggtttgcagcgaaaccagctggctgttgtaggttgagagatcggactgcgccgtttgcagatcgtccagcagctgcgccacgcgcgactcaagctggcgcaacgacagcgtggcaagcgtttttcgggtttcatcgtcgttatcgacgtcgctgagcgcactcagcgcctccgttgccttacgcatgttctccggcgcctgagcgaccttctgccgtagctgggccgtttcggctttgatgcgatcgatcttgtccagcgtttccagggtttccgttagatcctgctgaacgagcttttcctgggcggagagatctttttgcttattcagggtgtcgagttgcgactgaacatcagcacgcgtgggaatgtcactgccgttgtctgcacgtgcccatgaaagcggcgcggctgcaaagtaaaacagcaggatcaaaaacagggccagaacaggatgttgcgagcgattgatgtgcagcatagttgtgaatgtgatgtgagaaatgaccggaaatagtcgggcatgaaggatatcacgcccggctgaagcagaatagtacgacggaaagggtctacgatttttcccatgcccgatcaggcagagcgcgggctaagtttactttgaagggtcggacagagctggcacatctcaagaaaaatttcgacgtagctgcgcgcctctgatctgagatcgaacgactccggagcaaaaagccagttttccatcaggccggaaatatagctgcgcatcaggatcgccgcccggcgggtgagtaatgtggcaggaagcattttggcctgcatgcactccgtgaggacctgttcgatgcgatcgtagctttccagacacaggtcgcgctgcgcctgttgaaccaccgccatttcaccaacgaactcacatttatggaagatgatttccatcatcagacgacgacgctcttcaacaaccgtcgcttcaaggatatatactagaatttctcttaacactgagagtggatcgtgagggaattttgcccgatactcactctcaagatcgctaatgctggactctgaaagctcccagatttcaccaaacagatcggacttgtctttgaaatgccagtaaatcgctccccgcgtgacgcccgcggcctgagcaatctgtgccagcgaggttgccgaaacaccctgctgtgagaacaaacgcattgccacatccagaatgtgttgtcgggtttccagcgcttgttgtttggtttttcgtgccatacgttgatgaatttacaggagtcagatttacatacatttatgaatgtatgtaccatagcatgacgataatataaacgcagcaatgggtttttagactcaggacccttgatcaatttgaaatcggacactcgaggtttacatatgaacaaaaacagagggttaacgcctctggcggtcgttctgatgctctcaggcagcttagcgcttacaggatgtgacgacaaacaggctcaacaaggagctcagcaggtgccagaagttggcgtcgtgacgctcaaatccgaacctctccagatgacaacagaactaccgggccgcaccagcgcctaccgcattgcggaagtgcgtccgcaggtgagcggtatcatcctgaaacgtaacttcaccgaaggcggtgatgtcaaggcaggcgagtctctgtatcagattgatccagcaacctatcaggcgtcttatgagagcgctaagggcgatctggctaaagccgaagcggcagccaaaatctcgcagctgacgttgaatcgttacaagaaactgctcggcacgcagtacatcagccaacaggattacgattctgccctggccgatgcacagcaagccaacgcagccgttgtggcggcgaaagcggcggtagaaaccgcgcgtattaacctggcctacaccaaagtgacctcccctatcagcggtcgcattggtaaatcagccgtcaccgaaggtgcgctggtgcagnnnnnnnnnnnnnnnnnnnnnnnnnnnnnnnnnnnnnnnnnnnnnnnnnnnnnnnnnnnnnnnnnnnnnnnnnnnnnnnnnnnnnnnnnnnnnnnnnnnnnnnnnnnnnnnnnnnnnnnnnnnnnnnnnnnnnnnnnnnnnnnnnnnnnnnnnnnnnnnnnnnnnnnnnnnnnnnnnnnnnnnnnnnnnnnnnnnnnnnnnnnnnnnnnnnnnnnnnnnnnnnnnnnnnnnnnnnnnnnnnnnnnnnnnnnnnnnnnnnnnnnnnnnnnnnnnnnnnnnnnnnnnnnnnnnnnnnnnnnnnnnnnnnnnnnnnnnnnnnnnnnnnnnnnnnnnnnnnnnnnnnnnnnnnnnnnnnnnnnnnnnnnnnnnnnnnnnnnnnnnnnnnnnnnnnnnnnnnnnnnnnnnnnnnnnnnnnnnnnnnnnnnnnnnnnnnnnnnnnnncaaacaggagctggctaacggcaccctgaaacaggaaaatggtaaagccaaagtggaactggttaccaacgacggtatcaagttctcacagactggcacactggaattttctgatgtgaccgtcgatcagaccaccggctctatcaccatccgggccattttccccaatccggataaaaccctgctgcccggtatgttcgtacgcgcccgtcttgaggaagggactaacccaagcgccattctggttcctcagcaaggtgtgacccgtacgccacgcggtgatgcgagcgcactggttgtgggtgccgataacaaagtcgaaacacgcaatatcactgcaacgcaggcgattggcgacaagtggctggtaacggaaggtctgaaagatggcgatcgcgtaattattactggtttgcaaaaagttcgtcctggtgcgcaggtcaaagctcaggaagtgaaatctgacgacaaacaacaagcgtcggccgctggccagtcagaacaaaccaagtcttaacttaaacaggagccgttaagacatgcctaatttctttatcgatcgccccatatttgcgtgggtgatcgccataatcatcatgctggccgggggacttgcgatcctgaagctgcctgtcgcgcaatatccaacgattgcgccgccggcagtgacgatctccgcaacctatccgggcgctgatgccaaaacggtgcaggataccgttacgcaggttatcgaacagaacatgaacggtatcgataacctgatgtacatgtcctcaaacagtgactcaaccggtacggttcagatcaccctgacctttgaatccggtacggatgcggacattgcacaggttcaggtgcagaacaaattgcagctggcgatgcctctgctgccgcaggaagtacaacagcagggcgtgagcgtcgagaaatcgtccagtagcttcctgatggtggtcggcgtgatcaacaccaacggcaccatgacgcaggaggatatttccgactacgtgggcgccaacatgaaggacgccatcagccgtacgtctggtgtgggtgacgttcagctgttcggttcccagtacgcgatgcgtatctggatggatccgaataaactgaacaacttccagctgacgccggttgacgtgatcagcgcaattaaagcgcagaacgcccaggttgccgccggtcagttgggtggtacaccgccggtgaaaggccagcagcttaacgcgtcgatcatcgcgcaaacgcgtctgacctccgccgatgagttcagcaaaattctgctgaaggtgaatcaggacggttcgcaggttcgcctgcgtgacgtggcgaaggttgagctgggcggtgagaactacgacatcattgcgaagttcaacggtaaaccggcttccggtctgggtatcaaactggcgacgggcgcgaacgccctggacaccgcgacggctatccgtgcagaactgaagaagatggaaccgttcttcccgtcaggtctgaaaatcgtttatccgtatgacaccacgccattcgttaaaatttcgattcacgaagtggtgaaaaccctggttgaggcgatcattctcgtcttcctggtgatgtacctgttcctgcaaaacttccgcgcaacgctgatcccaaccatcgccgtgccggttgtactgctcgggaccttcgcggtgctggcgatatttggctactcgataaacaccctgacgatgttcgggatggtgctcgccatcggcttgctggtggatgacgccatcgtggtggtcgaaaacgtcgagcgtgtcatggcggaagaaggcctgccgccgaaggaagcaacccgtaaatcaatgggccagatccagggcgcgctggtcggtatcgcgatggtactgtctgcggtatttattccgatggccttctttggcggctctaccggtgcgatttaccgtcagttctccatcaccatagtttcggcgatggcgctgtcggtactggttgcactgatcctgacgccagccctgtgcgcgacgatgctgaagccgattcagaaaggcggtcacggcgagcataaaggcttcttcggctggttcaaccgcatgtttgataagagtacgcaccactacaccgacagcgtgggtaacatcctgcgcagcaccggtcgttacctgctgctctatatcatcatcgtggtgggcatggctttcctgttcgttcgtctgccaagctcgttcctgccagatgaagaccagggcgtgttcctgagtatggcgcagcttccggccggtgcgacgcaagagcgtacgcaaaaggtgctggatgagatgaccgactacttcctgaccaaagagaaagacaacgtcgaatccgtgtttgcggttaacggctttggcttcgcgggtcgtggtcagaacaccggtatcgccttcgtttctctgaaagactggtctgaacgtccgggcgcagagaacaaggtagaagccattaccggccgcgcgatgggcaccttctcacagattaaagatgcgatggtcttcgcctttaacctgccagcgattgttgaactgggtacggcgaccggcttcgacttccagctgattgaccagggcggtctgggccacgaaaaactgactcaggcgcgtaaccagctgtttggcgaggtggcaaaacaccctgacctgctggtgggcgtacgtcctaacggtctggaagatacgccgcagtacaagatcgatatcgaccaggaaaaagcgcaggcgctgggtgtttccatcagcgacattaataccacgctgggtgcagcctggggtggcagctacgtcaacgacttcatcgaccgtggtcgcgtgaagaaagtctacgtgatgtccgaagcgcaataccgtatgctgccgaacgatatcaacaactggtatgttcgcggcagcgatggccagatggtgccgttctccgccttctcaacctcgcgctgggaatacggttcaccgcgtctggagcgttataacggcttgccatcgatggaaatcctcggtcaggcagccccgggccgaagcaccggtgaagccatgaacctgatggaagaactggccagcaaactgcctgcgggtgtcggctacgactggaccggcatgtcctatcaggaacgtctgtccggtaaccaggcccctgccctgtacgccatttcactgattgtggtgttcctgtgtctggcggcattgtatgagagctggtcgattccattctccgttatgctggtggttccgctgggggttatcggtgcgctgcttgccgcaacgttccgtgggctgaccaacgacgtttacttccaggtgggcctgctgacaaccattggcttgtcggcgaagaacgcgatactaatcgtcgaattcgccaaagatctgatggagaaagaaggaaaaggcctgattgaagcaacgctggaagccgttcgtatgcgtttgcgtccaatcctgatgacgtccctggcgtttatcctcggcgttatgccgctggttatcagctccggcgcgggctccggcgcacagaacgcagtaggtaccggcgtaatgggtgggatggtaaccgcgaccgttcttgcgatcttcttcgtaccggtgttcttcgtggtggttcgccgccgcttcagccgtaagaatgaagacgttgagcacaatcattcggtagaacatcactgataccggtttcacatgataaaaaggccgcatttgcggcctttttctttttcagaaaaaatcataaaatagacctattgcctttctatttattttcctcctttttaataaggcctatcataataggccgataacttacaccaggaactcagcattcttttattatcatttcgcgacgtaaattattcggactattcctaagcaacagaaaatatctgaagatgtctggtttcggacttcacgtgaaactttgcgctaactcaatgaattctaaggaaccgataaaaatcggcttttttattgattaacacgtacgctgcaaaaggtagatttgcgtaaaggctcgaacagtaacgatttaattgtaatttttcgtaatagcgcggtgaaatcttgatcagagtggcttatagttagagttatcaggaacacagctcccgtgtggctaagcaagttgtatccatcccgacatgatgttcggtgagtaaaaaatcactcagaaggggatgcgctatggacgagtactcgccaaaaaggcatgatatcgcgcagttgaaatttctctgcgaatccttgtaccatgactgccttgccaatcttgaagaaagtaaccatggctgggtgaacgatccaacgtctgctatcaatttacagcttaacgagctgatcgagcatatcgccaccttcgcacttaattataaaattaagtacaatgaagataataagttgatagagcaaattgatgaatacctggacgacacctttatgttgttcagcagctacggcattaacgcacaggatttgcagaaatggcgtaaatcaggaaaccgtctatttcgctgcttcactaatgtcagcagagctaatccggttagtctttcctgttaaaattattacaattactaaggtgaatttatgtctgataaaccattaacaaaagtcgattatttgatgcgcctgcgacgctgccagtcaattgacacccttgaacgagttattgagaaaaataaatacgagctgtctgataatgaactggcggtattttattcagctgccgaccatcgtcttgctgagctgaccatgaataaactgtatgacaagatcccctcttcggtatggaaatttgttcgttaatcgttgaagagagactgtaaaggcactacgcccgttgttaagctgaatttacctttcgaattacgcttcaaatgcaaacgccaggttcccgtataaaacgtatttatgcgcaagaatgttgtgactcccgtcacagccacttttagggaacgttccctttctggttaatcctctttacgctgcgtaaaacgattccagagaggttcccatgagtgaagaaaaacagaagatgattgcaggtgaatattaccgccctggcgatgacacgctgagggctgaccgtttacgcgcgcgtcatcttgttcaccgctataaccataccgcacccgatgagaaggccgaacgtcgcgccttattagctgacctgctgggtcaaagcgaaggtgcctatatagagccaagctttcgctgcgactacgggtataacatctatctgggcaacaatttttacgctaacttcgactgcgtcatgctggacgtctgccctgtccgcattggcgataactgtatgcttgcgccgggagtgcacatttatacggccacgcatcctctggatgcgaccgaacgtaacagcgggctggagtacggtaaaccggtcaccattggtgataatgtctggatcggcggacgcgcggtgattaatccaggcgtgaccattggcgataatgcggttatcgcttccggcgcggtagtgaccaaagacgtgccggccaatgcggtagtgggcgggaatccggcgaaaatcattaaaatgatctaagcgcatcctgagtaactgttatgctttttcctggcataactgttactttcatcgcataaacccctctcataaaataggcagatcacctgtatttttaacaatcataaaggcaaaaaatgacagagatacagcgcctgcttaccgccaccatcgacgatctcaatacccgcgaaaagcgcgacaatcgcccgcgctttagcatcagctttattcgcaaacaccccgggttgttcgtcgccatgtacgccgcctggctggcaacgcttatcgtcatgctgaagtctgaaacactggtcgattccgtctggctactggttgtgctgttcgtggtgtttaacgcgtttttctttttcgacgtcaatccgcgttaccggtatgaagatatcgacgtactcgatttccgcgtgtgctacaacggggagtggtacaacacacgttacgtgccgaaggagctgatcgacagcatcctgcactcgccggccgtcgaagccgggcaaaaagagaagttgcagaaaatggtcatcactaagggccagctctctttttatgatgtctttaccctttcccgccccactgctgtgtaatgagcgcctgaagacgtcggatacccggcgcaaactgcgaagcagaggtattaccgtaacctaaaaccagaccggtttgcccctgcttcgtctcaaggtaatacccgctcagcgcagcgggtgccagctgaaacgctctcgcctgctccaccagccgctggtcgtcgataccgtcaatcgccagcgtcaggtgcattcccccttccccggcaagaacacggtgcggcgtatgcagctctgcgctcagcacctcccgcagctggcggtaacgcttacgataaaggcggcgcatggcggcaagatgtcgtgcatagtggccttcctcaataaatagcgccagggtgcgctgttcagcgcgatgcccgccgcgcagcagcgagccgatggccggacgcgccgccctcgccagcgctggcggtaacaccatgaaccccatccggagcgacggaaacagcgttttgctgaacgtccccagatacacaacgggcgcattgttgaccattcccagcatcgccgggacgggctcaccggtataacgaaattcgctgtcgtaatcatcctcaatgatccacgcgctgtgctgccgggccagttccagcagcgccagacgccgccgcgcgctgagcacgcttccacaagggaactgatgcgatggcgaggtaaaaatcagcgtgggtgaaggcgcagacagcccttcccagcacatcccctcgtcatccaccggtatgccggtcatcgccaggccggttttgacgaaagcgcttttagccccgctatagccgggattttccacccaggcgacatcccccggctcgcttaacagcatcgtgcacagattgacgccctccagcgccccttcggttatcacaatctggctggcatcgcagtcaatgccgcgggagagcgcaagatggcgggcaacggcggcccgcagcgtcggctcgccggccgggtcgccataccctaacagggtgcttccctcctcgcgcagaacacgatcgtacaaccgccgccacagcggtaaggggaaatagttgatggcaggcgttcccggcgtaaacgccatcaccggggtgtcgcgcggcacaggcgcgggcagcagggcgacacgttttgtcagcctgacgtccgggtccggtaatgtccgggtaatcgtccgaggagcgaattgccccacccgcgtaccctggcggctacgcagcaaataaccttcgagcgtgagctggtccagcgccgcattgacggtgtttcgggacaccgagatctgctgcgccagcgttcgcgagccgggcaaatggctgccggaccggagccttccgcacagtatggcctcccgcaaagcaagatagagcgcacgctggagcgtctcttccccacgttttttcagcgcagcatggagcaaggtgtaaagctcatcacccggtatattcatcattcctcctcgtggtaccagaaaaacatagcctggtggttctttttaaggaaccagcaattcattaatctggagatcttttcaatgtgacgggaataaagatgaatacattcaatgagtttggacaacctgtaggcgaaagccttttcgactggcagcctcgcccgcacccgtcccgggtggtacttcagggtcgctattgtcggcttgagccgctgcgcgtggagcatgccccggcgttgttctctgcgtattccctggccggagatacccgaagctggacgtggctgctgcgtgaacccgatgccaccgcagaggagtttgccgaatgggtggcgagcgtgagcgaattggccgatcccatccactttaccgttatcgataaccagacccagtctccagtcgggacgctgtccctgatgcggatcgatcctaaaaacggcgtcgtggaagtgggacatgttcacttctcgtcactgttaagccgcacgcccatgtcgacagaagcgcagtatctgctgatgcggtatgtgttcaataccctgggctaccgacgctatgaatggaagtgcaacagcctgaacgaaccatcccgcaaagcggctctgcgtctgggctttcagtttgaagggcgttttcgccaggcgctggtcattaaaggccgaaaccgggacaccgactggttttcaattctcgacaaagagtggccagcgctggcgagcgcgtttgaaagctggcttgccaccgacaattttaacgccgatggcaaacagaaaagatccctggaaagctggcgagaaacgcgcgtctagcgcctttttttacgcccctgcaccgccttaaagcgcgggttagatttgcagatcacgtataagcgtcccttgcgtttgactatctggcaatccgggtgacgctgttttgcactgcgcaatgagttcagcacctgcatgattagcctcgcttcgcatcaagaaagccaccaaaacgcttgcggaagcgtgccgcgctgccatccgtcgagaaggtcttctgtttcccggtataaaacggatgtgatttagaggagacatcaagggtaacgtagggatacgttttcccctccagctcaatttcacggtctgtcttaattgttgagccgactttaaagtattcattagccgtggtgtcgtgaaacacaacggtgcgataggttggatggatattcggtttcatctctggccttcatgtattgttataacataacaaaatactatctgagctttgctgcaaaaacaacccctgtcacgcacagcctgtttttgaaaggttgattcagatacctgcctgagactgtcacatgctataactatatcatttagcgataaaaaactttttcttctggcgcgcaaactccaggcccaaggtgggcatatggaaaggataaagcagcatgcgaacccgacatctggtcagcctggtaacaggcatactgatcttctctgtgctggtccctgtgtgcctcagtatctggctggcgcatcgtcaggcagaggataaatttgtggacgctctggacagctatgcctcgcgcgtcctgatccgtaccgacagagtcgttgcgcaggcaaaacaggcgctcacgcacctacagacattccacgccccaccctgcactcccccgcatttacgcgaaatgcgtcgggttgaattctcatggcgctatattcaggaagtgatgtatatcgataacctgaagccgctctgctcatcccttgaacaatccagtaatacggcgatcttaccgcccccgatgcggatcaccgcagacgggtatagcgcgtggctcacctcgcaaaacgacctcggcattcaccgctatatggccgttctggggaaaggacattatctggtgatggttgatcctgcctcgcttgtggatgttgtcccgtttggtgaaatttcgatggatgccgccctggtgggcagtgaaacccatcggatatttgccagaagcaatattgtcgacccgtatattctttctgtcgttaaggagcagcaggacgttacgcgcgtacaatacaacggctcgatgtacgtgttgaaacctgtacccgaactggggtttacggtgatcgcgtgggcgtcgttaaaaccgctggcggaatcctggcaccagcagctgatcatctggctaccggctggcatcttgctaagcctggctgctgcccttattgtcctgcgcatcctccgccgtttgttatccccgcgtaaccgcctgatcgacgcaatcaacaaccgggagatcgaggtttactatcagcccatcgtggcgctgtgcagtggaaaactggtgggtgctgaagcgctgatgcgctggccgcagccagatggcagtcacctgtcgcccaatctctttgtgccgctggctgagcagacggggcttatttcaacgctgacgcagctggtggtaaataaggtgtttgaggatttaggcgcctggctgcatcatcacccggaactgcacatttctgtcaaccttgcgccatcggatttaacgtcccccgagctgcctcgccagctgagtcagttgctcaacaaatggggcgtccacccgcgccagatcgcccttgaattaaccgagcgcggctttgccgatcccgccgtcagcgtgcctgccatcgctgcgtttcgccgcgccgggcacgctatctacattgatgattttggtacgggttactccagcctgagctatttgcaggacctggatgtcgataccctgaagattgataaatcctttgtggatgcgctggagtacaagaacgtgactccccacatcatcgaaatggccaaatcgcttaaactggcgatggtcgcagaaggcattgaaactgaagggcagattgaatggttgcatcgccacggcgtgcagtacggccagggctggtatttcagcaaggcactgcctaaagaggatttcattctctgggccgggcacaacctggagaagcacattacttaaggtacgatttgatcacctgcatcacgaccccgagatcggcctcgcgctgcgcttcctctggctctttcaccacgtgatcggttaaatgtccctcaattacttgcatcatcatgccgtttaccgcgcccctgatcgccgccagctgctgtaacacctcggcgcattcatgatcgctgttgagcattttttccagcgcagcgctttgcccctgaatttttttcaggcgggtcaataacttctttttatcacgaactgtgtgtgacatcgcttagctcctctttggtggcgtaaaaagcatatcacgctctactccccctgggtatttttctactggggggtagtattatactactgggggggagtagtattctcggcatgttttccaccccggaatgttcaatgaacgatttttcttctcttctacagcagggtaacgcctggctgtttgtccccagcgccatcctgcttggcgcgctccatggccttgagccaggccattcaaaaacaatgatggcggctttcattgtggcgatccgcggtacgctgaaacaggctgtgttgcttgggttgtccgcaacgctgtctcatacggcggtcgtctggatcattgcgatggcgggattatggtttggtcggggatgggatgcagatacttctgagccctggtttcagttgatttccggggttctgatcgtgttgatcgccctgtggatggcgtggcgaacctggcatgagagccagccgcatcaccaccatgataatcatcatcaccatcatgatcatcacgaccacgcgcatcatcacgaccacacgtctcctctggttgaagaggagtggcaggatgcccaccagcgcgcacacgcccaggacattaaccgacgcctcaacggtaaagaggtcaccaccgggcaaatcgcgctattcggcctgaccggtgggcttatcccctgtccggcctccattacggtgctgctgatctgcctgcaactgaaacatttcgcgctcggcgccacgctggtgttcagtttcagtatcggactggcgctcactctcgtcgcctctggcgcaattgccgcattaagcatgaaacatgcggcgaagcgctggcccggctttagcgccttttcgcgcaaggcaccgtggatctcagcggcactgatcgcggtagtcgggatttatatgagcattcacggcgcaagcgggatcctgagataagcattgcggccacggcagtggccgcacgtgtcggctcagccgttctgctgccagctaaacgtgtagcgcagccggcggttttgcaaaatgaaggccggggctacgctcgggctccatgagtcgtccccccctacgcccatgtgaaacgcatcaagattcaaccagcagccagcctcttcccgcagaaaatgctgatgcgttgtctcatgcagctgccgctggctataacggctcagggagaaatggaactgtccctgcaactgatgggagccaaacgtcagctcgcgggtgtcgcagcgcaaaccgttctccgtcgggaagatatacggcgtctgcatctcttccagcggtaacgcccagcgcccctgctgcgccgccagttttctgtccggatagttctccagcgggcctagccccagccagcgcaccgtttccgggatatccgccagcataacgctcaggcccacgcgagcgggctcaggaatgtcagacgccaccgtcacctgcacatcaccgtgcagcaccccgtggtcatcaatccgccagagcttgcagctgataaacagcgctttaccctgatgctcccagacgtgctgcgtggtcaccaccacctcacgggcatgctgctccgcttcacactggaggaggcgcgcggacatcccatacatccctgccgctttccagcgttccacccacgcgttcggatcgatgcgggtcgcctcgctgacgccaatgtcattgtccagcggcgcgcgggtgaagttatccgttagcggggaacggagcgtttcagcgccctcgttccaccactgggtcaggtttccggtgagacggctaaactgccagcgctgctgctgatgagtaatgtccagcgcttcgtcccgcaccgttagctgcggaggggctccgcctgctttcggtggcgcaaggtacagcggagccgggagcggccactgatcccaggcacaacggtggccgggcggcgaccacggcgtggcctgcggctgaacgatctccacgctgagccagacctcgcccggctcagcgtcaagctcaggcagcgggatctcaacgcgctgcgtctcctgaggcgcaacagaaaggggtatttcgccggaagccaacaccgcaccgtcacgcgccaccgaccattgcagatgctcgttgtcagtatgacggaacagataatcgctctggatctcgacgaccagcggagcggtgctcaccagcgtaaaggtaaagaactgctgggcacgctgcgcctcgtaaagggcggggtgcggagtgcgatcgggaaacaccagcccgttgaggcagaactgacggtcgttgggcttatcgccaaaatcgccgccgtaggcccagaatgccgtgccgtcttccgcttttttcgtcagcgcctgatcgacccagtcccagacaaagccgccctgcaaacggggatggctgcggaatgcctgccagtagctggcaaagccgccaaagctgttgcccatcgcgtgggcatactcgcacaggatcagcggacgggtttcgtccggcatgccgatccactttttaatcgaccactttggcaccgccgggaatggctgatcctgatcgacgcgggcatacatcgggcagacaatatcggtagcggccgtactggcgccaccgccttcgtactgcaccggccgcgtgggatcggcggttttcagccagcggtacagcgcatcgtgattcgccccatgcccggactcattccccagggaccagatgatgatggacggatgattccggtcccgctgcaccatacgcgttacgcgttcgctcatggcaggcagccagcgcggatcgtccgccaggcggctcatcggcaccatgccgtgggtttcaatattcgcctcatcgaccacgtacaggccgtagcgatcgcaaagcgtgtaccacagaggatggttcggataatgcgagcagcgcacggcgttgaagttatgctgcttcatcagttcgatgtcgcggcgcatggtcgcctcatccatcacctgccccttctcaggatgatgttcgtgacggttcacgccgcggatcagcagcggtttgccgttaagcttcagcaggccgttgctgatttcgacgcgtctgaaaccgacatcgcaggcttcagtctccagcacgttaccctgcgcatcccgaagcgacattgtcagccgatagcattccggtgtttcagcgctccacagcgcgggagcgttcacggggatcgccaccgtgagccgttctgcccaactgccgcgttcgtccacgatggccgatccgggctgctgcgtggtttgcgcgcaggcttcgccgttacgccacagggtaaacgccacctcgcattcggcgtagcgtgagccttccagcgcaacgtcaacccggagtatcgcccgatcgcattcggcattcagatcggtcacgatctgataatcggcaattcgcgtttccggcttgtgcagcagcgagacgtcacggaaaatgccgctcatccgccacatgtcctgatcttccaggtagcttccgtcgcaccagcgtaacaccatcaccgccagacggttctgccccggtcgcagcaccgcgctgagatcgaactccgcaggcagacggctgtcctgcgaatagcccacccactggccgttacaccacagatgaaaagctgaattcaccccgtcaaaaataatgcgggtttgcccgctgcacagccaggcgtcatccatctcaaatgtgagcgagtaacaaccagttgggttttcagccggaacatacggcgggttcacatttatcggataggtgacgttggtatagatgggagtgtcaaatccctccatctgccagttcgacggcacgggcatctcaacggcgtcagccagatcgtccgttatccatgcctcgggaacctgctctggcgccgggaaaaagctgaatcgccagacgccgttaagcagacgcttgcttagcgaaagtttatcctcgcgggcgaaggtttcatcgcgccagctatgaaaaggcgcgtgtgtagccagacgattccactgcgtcacgcccgggttttcccagtcacgacgcgccagaagtgcgctgagggtcagcggcaatgtagaagacatatcaacctctttgcgaagcgctcacaatttcagccaacatgccctggtaaacggtggcggtaaagactttgatcgtcaccaggcgaacacgatcacaaaagtgctagctgcgcgccagtttctccgccagcagcgccagcgttctgagctgttgcgccagatcttcacgatcggcctgctgtgcggcgcgcggcgcggtggaatgacgtactatcaacgtaacgggaagttgttcctgccagcattcgtcgtgatggtcaggtgccatcagccactccacgctgcgctcaccggcctcgcggaacgcctgccgaacggtggtgagcggaggtgaaaaccacgcgctgtcagccgtatcatcaaacccgacaaccgagatctgccccggtaccgcaacgcctttttccgcacaggcgcgtaaaacgccaagcgccatctgatcgttagcgacgaggatcgcctccggcagctgcgcgcccgccaggagctgatgccctttctcatagcccgaggccgcgctccagtcgccctgcgccaccgcaaacgcctccacgccggcccgggccagcgtggttttccatcccgccagacgagcccgggcagagacagaactttccggcccggcgagcagcgcaattcgctggtgccccagcgaaagcagatgctctgcccccaggccagcgccctgttcggcattgaaaacaaggctgttaacccgagctgtgggggaaacatcgagaaaaagaaccggggtcggcgaggccatttcctgaagcatttctgcctgtgcatcttccagcggaacgttcaccagcagcgcctccacgcgctgcgccagtaattcctgcaaagcagcctgacactgcgcgggttgctccaccatggagatgagtacgctagccccctgctccactgcccgggattttacagctgaggcgatttgcgacggcgcatgcagcgccagatcgctggtcatcagccccagcgtgcgggtacgtttcccggccagctgctgcgcgccacggttaggcacatagtgtagcgccgccatggcctgccggaccttttcccgcgtacgggcagaaacgtgttctgcgtcgttaatcacccgggaaacggtctgataggaaacgcccgccacgcgggcaacgtcataaagagtgatcgctttcatacattctggcgtcgtaaaaagagaagtctctattctgacacagttacgccatcatagcctgtgagcgcttcgcaaaattaaacaatccgctccggccgcgcggctttctgaatgcgcggtccctgacgaaaccacggcaaacagagctggatcagcgggccgatggttaatgcatacagtacggttccaacgccaaacgctcccccgaggaggtagccgacgatcaacacggtcacctcgatcgcggtacgcacgctgcggatcgaccagcccagccgggcatgtatgccggtcatcagaccgtcgcgcgggcctgcgccaaaacccgcgccgatatacatcccggtggcaagggcgttaaccacaatgccggaaaccagcagggtgatgcgcacgggcagcgaggtgagctcagggatcagcgccattgacgcatcggccgccagaccaatacaaatcacattactgatagtacccagtcccggcagctgacgcagcgggatccacagcagcagcaccgcggccccggttaaaataatcaccgtgccgatgctcatcccggtctggatggcgacgccaaggtgaaagacatcccacgggtcgacacccagatccgaacgaataaacatcgcggttgaaagcccgtacaggcctaaaccgacataaagttgtaccagacgacgtaccattttctcttctccgaagaaccaggttccatcttcggtgaaaatggcactatgattaatgtccagttttcaaatagtggactgcatatgtcatcacgtcgttttggaagccagtctctggtacgcctgttagggcactggcagcaagcctcttcccgcaccccgctgtggcgccaactggctgacgcgttacgcctgttaattctggatggcaggctggcgttaaacacgcgcccgcccggagagcgggaactggccgccgctctgagcgtaagccgcaccaccatcagcagcgcgctggcgcatctgcgggaagagggatatctggagagccgtcacggcagcggttcgcgggcgatcctgccagaccgccgcgccgtgcccacgctttctactgccagcgcggcgctggatctctcaaccgccgcactcaacgcggggccagagatccaccaggcctacgcccacgcgctgacggccatcacgccgaatctggcactgaccgggtacgatcagcttgggcttccggcgctgcgtgaagctatcgccgcccgctacaccgcacgcggtctgcccacccgggcagacgaagtgatggtagtgaacggcgccgtcagcggcttcgccctgatcttaagaatgatgaccggtcccggggatcgcgtggtggtggatcatcccacctacccgctggcgatagccgctattcagggggcgctatgccggcccgtgggcgtttcgctgcctgaaacgggctgggataccgacggttttgccgcaacgcttgcccagaccgccccgcgtctggcctatctgatgccggattttcataatccaaccggacgttgcatggatgccgcgacgcgccagaccataaccgacatcgccgcgcagacccgcaccacgctggtggtggatgaaaccatggtcgatctctggttcgatgttcccccgccgccgccgctggccgcctttaacccggaggccacggtgatgacgctgggttccgcaggcaaaagcttctggggtgggctgcgtctcggctggatccgcgcctcgtcacgcactatcgccaccctcgcgcaaacgcgcgacacgctggatctgggctctccggtgctggaacagctggccacgctgtggcttatcgaaaacagtgcaaccttcctgcctgcccggcggcaaatgctggcagaacggcgcgaccgctgcggccagatgctgcgggaacatttccccgaatggcggtttcaggaagcggagggagggctttcatactggattgaattacccggcatgctggcgacacagctggcggcacgcgccgaaacgacaggcatcattatgggcaccggcacgcgttttggactatcaggcgcgtttgaccgctacctgcgtatgcccttctcactcagttcaccagaacttgaagaggcattattgcggatcaaaccgctgtggcgtgcattaaataaaagtgtagcgccagtaaaacggagcctggtgtaaattattcgccagaaacaataaaaactgctgactgtatcgcatgcagtcagcagttttcatgaagaacaacttaatgttgaggtggaatcgggaagcctttcagcgaaataatgaaattatccccttctttctttatttttgcaccggtatcacaccagtcagacgcaatacgaaagaactcatcacttcctacattccagccaagacgaacatgtttcacgtagccggaacgtaacagattgcaggcctcgttgtagtcactggcagtcgatagttgttgtttcattttctcttcttcagaagtttacgtagtgctttgatttctttaggagtaaatggagttacgctctcttcttccgtatgctgattatcaacatcctcttccgatactcccgcctcttctactgcttcaaatgccagcagcagcagtttctctgtggtcacgcttaaattctcattattgtcttccgcatagtggcgaagtctttcttttagcgcttcatcaattttaacgtttaaaaccgcagtaaccatgattgtcacatcctttcggaacacgtgtttaatttaatacacgaagataagtttgttatccagatatatattttttagcttataacagaataaaggcatcgaaaaataaaatgacagtctattattacaggtttatgacattattatttcagttaaatgaaggttgcattacaaaaaatacaatagtcacattatttagaaggtttattcaggggaacgactggagaggagctcaaatgggtgggggccctgccagctacatcccggcacccacgtcgtctgccctggctgcttccttccggacctgacctggtgaacagagtagcgttgcgggagaaccaacagagcccccattgagagcgttgataaccaacgcgctggcgcattatccctgtggagcacctcaattgcaagccgctggcaaccggatgctggattattgcgcaaactgccccgacaatcttctttatcttcgtataacattacccttcgctgatttcccgcaggagaaacaatggacgaacatgacactttcccacagcgagtgtggcaaatcgtagcctcgatcccggaaggctgtgtcacgacctatggggaagtcgcccggctggcgggttctccgcgcgcggcgcgtcaggtaggcggcgtgctaaggaggctaccagaaggaagcacgttaccgtggcaccgggtcgtcaatcgccatggcgccatttccctcaccgggccagacttgcagcgccagcgtcaggctttactttcagaaggggtgcaggtgtccggggcaggacaaattgatatgcagaagtatcgctgggagtactgacgccctctcccgtcaacatggagagggcgaaagagaattacagctgtgttggcggtgtaggcagagtcggctgattggtctgcgttgcaacaggcacttcagtttgctgcaccggtaccagggtcaggtcattttggtgccnnnnnnnnnnnnnnnnnnnnnnnnnnnnnnnnnnnnnnnnnnnnnnnnnnnnnnnnnnnnnnnnnnnnnnnnnnnnnnnnnnnnnnnnnnnnnnnnnnnnnnnnnnnnnnnnnnnnnnnnnnnnnnnnnnnnnnnnnnnnnnnnnnnnnnnnnnnnnnnnnnnnnnnnnnnnnnnnnnnnnnnnnnnnnnnnnnnnnnnnnnnnnnnnnnnnnnnnnnnnnnnnnnnnnnnnnnnnnnnnnnnnnnnnnnnnnnnnnnnnnnnnnnnnnnnnnnnnnnnnnnnnnnnnnnnnnntggtgccgcctttgttgaccgcttcctgcacggtatcggtgataaagaccagcttatcgttgatcgttaccgccgcgctcaggaggatacgcgcattaggttgcacgtcagacgggttgtacggcagcacaaagctgaacggcgcctgtttaccctctgtacgaaccgcgcgctgcgcaagcactttagacggcgcatccgccagggaagcatcagacagcgtgaccgttaaaaccgcatccggcggcagcgcaaccttctgtttgatccagatcgtaccggaaacatttggctgctgaatagcttgctgtgaaagggtgttaatcccgtttgcgcttgctgttggcaccggtacatcggcactcttaccagcacaggcggacaacgctaccgcaattgctacaccactgagcataggcacgagtttcattgaagtctccttatcatcaatgcaccagcgggatcgatcccatctgatgtcgttttattcacacaacgaatacaagtgtggcacaaatcacggatttatgcctaatttcgtccggatattaagattattctacccatcggaccactttcatttctgggttatactcagcgtatctttcgctacggcgtttattgaggaccactatgagtcaggcactgaacaatctgctgacattactgaacctggaaaaaatagaagaagggctatttcgcggacagagcgaggatttaggcttacgccaggtttttggcggccaggtcgtggggcaagcgctgtatgccgccaaggagaccgtcccggcagaccgtctggtgcactcgtttcacagctactttttacgccccggtgacagcgctaaaccgattgtttacgacgtggaagttctgcgtgacggtcaaagcttcagcgcccgtcgcgtggcggccatccagcatggcaaacccatcttctacatgaccgcctcgttccaggcgccagagccgggctatgagcatcaaaaaaagatgccgtctgccccgtcgccggacgatctgaaatcggaaaccgaaattgcccgcgctctcgcgcatctgctgccgccgcaggtaaaagagaagtttctgtgcgataaaccgctggagatccgcccggtcgaatttcataacccaatgaaggggcataccgctgagcccgcccgccaggtgtggatccgcgcaaacggcagcgtacccgcagatttacgcgtgcatcagtacctgctggggtatgcgtcggatttcaacttcctgccggttgcgctacagccgcacggtgtgggcttcctcgaaaaagggatgcaggtagccacaattgaccattccatgtggttccaccgtccattcgatatgaatgaatggctgctttacagcgtggaaagtacctctgcgtccagcgcgcgcggctttgtacgcggggagttttacactcaggatggcgtgctggtggcttctaccgtgcaggaaggtgtgatgcgtaatcgcgggtgatgtaaaaagcccggtggcgctgcgctcaccgggcctgcgaattgtgctttttcaggccgggtaaggcgaagccgccgcccggcaaggcactcaaattatgcgttataggcattctcgccgtggctgttgacgtccaggccttcgcgctcctgctcttccggcacgcgcagcccaacggtcatatcagccagcttgtaaccgataaaggccacaacaccggaccagacaacggtgatcgcgatgctttccagctgtaccagcacctgatgcatcatggtcacgccttctgcgtaacccacaccgcccagagattgggcagcaaagataccggtcatgatacagccgacgatgccgcacacaccgtgtacgccgaatacatcacacggatcgtcaacgcgcagaacacgtttcaatgcggtaacgccccacagccccgccagtcctgcgacgataccgatcagcagcgcaccgcccacgcccacgtaaccgcacgctggcgtaatacctaccagaccggcaatcgccccggaacaggcacccagcagcgatggcttgccgcgaacggcccactcgccaaatacccatgagaggatagcgccggcggttgccacaacggtattcacgaaggccagcgcggcgatttcgttagcggcgctggctgaacctgcgttgaagccgaaccagccaaaatagaggatggcggtgccggtaaagaccatcggcagattgtgcggcttaaatgcttccttcccgaagcccacgcgcttaccaatcaggtatgcgcctaccagacctgctaccgcggcgttgatgtgcacaacggtaccgcccgcaaagtccagcgcgccatgggaagccaacagaccacctccccagaccatatgcgcaatcgggatataggagagcgtcagccagaccaccacgaaaatcagtaccgcagagaagcggatacgctcagccagcgcgcccacaatcagccccacggtgatgcaggcgaatgagccctggaacgcgacatgaatatactgataaaaactgcccatcaccgcggtcagttcgatatttttcagcatcgcccagttaacgttgccgaagaaggcgttgccctccccgaaggccagcgagtaaccgtaaaccacccacagcacacacaccagcgcgaacgtgacggcaacctgcgtcagcatggagagtacgttcttgccgcggatcaggccgccgtaaaacagcgcgatccccggaatcgtcatgaacagcaccagcgcggtgcaaatcatcataaaggcgttatcggctttgtctgccacagcaggtgcagccattgccaggcccggcagcagtgccagcgaacccagacctgttttcattgttgctttcttcattttctcgatccctatcactgtgtgccaggagttacttacaacgccgcttcgtcagattcgccggtacggatgcgaatgacgcgctgtagttcggcaacgaaaattttgccgtcgccaatttttccggtgtaggctgctttgctgacgacatcaatcacctcatcaagctgatcgtcggcaatcgccacatcaatcttcacttttggcaggaagttaacgctgtattccgccccgcgataaagctcggcatgacctttctgacgcccaaagcctttcacttcggtgacagtcagtccctgaatacccatggaagacagcgcttcacgcacgtcttcgagtttgaatggtttgattaccaccgtaaccagcttcatatatcccctccagtcagaattcggtaatggccgcagctaacacgaaagggatattgcaaagggtgtgccagaagtgaaaggtgaggaggaaagcgccgcggcgcggatgcgccgggaagaggcgaaaaaaaacgcaccatggcagtgcagggtgcgtttcagttttgcaccaacggttaagtctgttagcgcattgccttgttatggtgcatcaggcgctgagtgactcttcctcgcgcgcgctggcggccagttcgtcgcctgccagctgcaactgatacatctgccagtagcgtccttttgcctcaagcagcgctctgtgcgtcccccgttcaacggcctggccacggtgcagcaccagaatggtatcggcatcgacgatggttgagaggcggtgggcgattaccaccagcgtagtgcgatcccgcacggcagccagcgcctgctggatcgcctgctcggtaccggagtcaatgcttgcggtcgcttcatccagaattaacacctgcggcgtctcaatcagcacgcgcgccagcgcaagaagttgcttttgcccgaccgagagattattgccctgctcacccagccgggtatggatcccctcgcttaacccgcgcgccagatccgcaagctgtaccgtttccagcacctcccatacctgctcaggcgtgaaaggtcgtcccagcgtcacgttggcataaaaggtatccgccagtaccaccggatcctgctgcaccatcgcgacgcccttacgtaacgcgttgtggctaagcgcggcaagcggccgtccgtccagacggatctccccctgcgtcaacggatagtagcccatcagcaaactggcgagcgtgcttttgccgctaccggtatgcccaaccagggcgacaaaaccgcgcgacggtacctcgaggttaatatcctgcaagacaagctggtcgtcgcggtaggcaaacgagacatgatcaaacgctatggatccactttccagcgggcgttcgtcatcgccataggtctgacgcggcctgtccatcagctcgaatacacgttcgcccgcgaccactgcctgttgcagcatcgattgctgcgtggtgagttcaatcagcggttcgttaaggcgtccaaggtagctgataaatgcgtacagtacccccacctcgatggttccgcgcgtcgtcaggccaaacagcatcaacagcccgcacagcaccagcgcagagaagaggctcagcagcgggcgtaacaggaagccatccagccgtaacgtctgcatccgcgccatatagtgcgagcggctggcttctcccattcgctcgccaaaacgcgcctgctggcgaaactgctggataacgctcatgccgttgatcacttcgttgaagccatcattgatatctgcgaggtaagcgcgcacgcgacgaacaatcggcgtgctgtagcgctggtaaattaccatcacaatcagcaccgccgggaaaatagcgatcgccaccagcgccatacgccagtccaggctgaacatcgccaccaacatcgcgccaatcaacgcggcactgcgcagaaccgttgcgacaacggttacatagaggtcgcggatcacctcggtgtcattggtgacgcgcgaaataacctgcccgaccggctgagtatcaaactcgctcagcggctggcgcagcgcggcatccatcacatccgtgcgaagctgctggaccacgcccacggcggcccggttaaacagcagcgactgcgcatagtgcagccccgccgccgtcagctgtaggccgacatacgccacgcccagccccgccaccagccccagcggcagatagtttttcgccaccatattgtcgatgaaatagctgataagcagcggaccggtcacctccgcaatcgcggcgatccacagcaacagcacggcgatggaaagcggtttgcgccacggcgagccataggccagcagccgttttaacgtcggccacatctgtccaaacttacgcatcggcgacctcctcatccagcgcggcttcaagctgttgatagcggtacatatcccgataccatccggtctgcccggcaagctgctcatgctgaccacgctgagcaatatgcccgtgctgaagcaccagaatttcgctggcttcggtaagggccgacagacggtgcgcgctgatgatgaccgtgcgcccctctccccactggcgaaggttatgcaaaatttgatgttcagtacgcccgtcaaccgcggacagcgcatcatccagtatcaggatctcagcgtccagcagcagcgcgcgggcaatagagatacgctgtttttgtccgccggagagcataacgccccgctcacccacttccgtgtcgtagccctgcggcaggcgcagaatatcctcgtggacgctggccagacgcgccacgtgctcgatctggtcctgtgtcgccgtcggacacccgagcgcgatattgttggcaatggtgtctgaaaacaaaaacggcgtctggctgacgaccgccaggcggctgcgccagtcatccagcagcagacgtggcagagggacgtcgtggaaacggatatcgccttcgctcacgtcaaaatggcgctgaatcagtgacagaatggtgcttttaccggaacccgtcgggccacagatgcccagcatctgaccaggacgcagcgtgaaactgacgttctcaagcaccggatgttccgtttgcgggtagataaaggcgcggatatcagccttgagaatacccggaccttccgccaccggctcgctgccatcgttcacgaccggcacttccgccagcatggcgcggatacggctgtaagcggcgctcccgcgttcaacgatattaaacatccaggccagcgccagcatcggccagatcatcagcccaaggtacatcgcaaagctggttaactgcccgagggtcatcgtgccttgcaccaccatccagctgccgccgcccactgccagcaggttcgccatgccaatcgcaatataaattgtcggatcgaaacgggcatcaatacgcgccacgcgcatgtttttcgcgccggtatcggcggcgtcggcggcaaacagcgcggactggcgatcttccagaccaaacgctttaatcatgcggatgctggtcatgctctcctgggtgcgatcgttcagcgacgagaacgccgcctgcgccagcttaaagcgttcatggagctgctcgccgtagcggttaattgccagcgccatcagcggcatcggcagcagcgccagcagcgtgagctcccagctaatttgcgtagacatcacnnnnnnnnnnnnnnnnnnnnnnnnnnnnnnnnnnnnnnnnnnnnnnnnnnnnnnnnnnnnnnnnnnnnnnnnnnnnnnnnnnnnnnnnnnnnnnnnnnnnnnnnnnnnnnnnnnnnnnnnnnnnnnnnnnnnnnnnnnnnnnnnnnnnnnnnnnnnnnnnnnnnnnnnnnnnnnnnnnnnnnnnnnnnnnnnnnnnnnnnnnnnnnnnnnnnnnnnnnnnnnnnnnnnnnnnnnnnnnnnnnnnnnnnnnnnnnnnnnnnnnnnnnnnnnnnnnnnnnnnnnnnnnnnnnnnnnnnnnnnnnnnnnnnnnnnnnnnnnnnnnnnnnnnnnnnnnnnnnnnnnnnnnnnnnnnnnnnnnnnnnnnnnnnnnnnnnnnnnnnnnnnnnnnnnnnnnnnnnnnnnnnnnnnnnnnnnnnnnnnnnnnnnnnnnnnnnnnagcgttagcaccccttcaccggcggcaaacaccacgcggtctacatcgttagtggcgcgggcgatgagatccccggtacggtgacgcagataaaactcagggtgctggcggctcagctggcggtaaaagtcctcgcgcagctcaacggcaagctgataggacgcgccgaacagcagcacgcgccagacataacgcagcaggtaaaccaccacggccgtcagcaccagcgtaccgccccacatcatcacccgtgcggcggtgtaatgttgttccgtaacgccatccacgacgtaacccaccactttgggcgggatcagttgcagaatggcaatgataataagcagggccaccgcgccgaggtagcgttgccactcccgacgaaagtaccagcttaattgggcaaataatcgcacgcggtcttttcctgaaggtattttaagaagttattcaatgggtaacgctgtggtgtatttaatctgttccatggcgaaactggaggtaacatcggacaagcccggtacgctattgaccagccgcttgtagaaatcatcgtagcgcttcatgtctgccacctgaacgcgcatcagatagtcgtattcccccgccatgcgccagaagccgagcacctcgggcatgtcggaaacctgggtgacgaagcggcagtaccattcgctactgtgatgctgcgtttttatcaggacgaaggcggtcagtccaagccccagtttttcggggtccagcaacgccacgcgtcccagcagaatgccatcatcttccagcttcttgaggcgcttccagcacggtgtggtggtcagattaacggcatctgccagcgcctgcaaagagagggtgcagtcgctttgcagcaaagaaagcagcttacgatcaattttatctaacatagccacctcgaagagaaaattattctccttacattctattttaaaggtcagatagcaacaattttttctgtgcttttcgctatgctgggcacaaaatgacaaacggataactacgatgaatagcaactgggttaaacatgccatcagcgaaataaatgccgactatcagcgctcggcagacacccacttgatccgcctgcctctgcctggatttcccggcattcagctttacctgaaggatgaaagcacccatcctaccggcagcctgaagcatcgcctggcgcgttcactctttttatacggtttatgtaacggctggatcaaagaaggcaccacgattattgaatcgtcgtccggatcaactgccgtttccgaagcctactttgcccgcctgctgggcctcccgttcatcgccgtgatgccctcctgcacggcgaaacgtaaagtcgaacagatcgaattttacggcggacgctgccactttgtggaaagcgcctgcgaaatctatgcggcctccgaaatgctggcccgcgaactgaatggtcactatatggaccagttcaccttcgccgagcgcgccaccgactggcgcggcaataataacattgcggatagcattttccgccagatgacccacgagccgcatcctgttccctcttacattgtcatgagcgcgggcacgggcggaacctccgccaccatcggacgttatatccgctgtcagggttatgatacgcagctgatggtggttgacccgcaaaactcggtgttcctcgattactggcaatcccgcgatgccagcctgcgcagccccgtggggagcaagatcgaagggattggtcgcccgcgcgtcgaaccctcgttcattccggacgttgtggatgagatgctccgcgtgccggacgccgccagcgtcgcgacggcgcactggctggagacacagcttggccgtaaagtcggggcttccaccggcaccaatatgtggggcgcgctacagctggccgcgaggatgcgcgaagaaggccgtaccggctctgtcgtcacgctgctgtgcgacagcggggagcgctacctggacacctattacaacgcagaatgggtgcaggcaactattggcgatgtagaaccgtggaaagcgcagatttcgcagctggtgaaataaaaaaaagccaggctaaagcctggcttgctggaagggtctcactattcgggggaatatgggaggttatttttgtccagccaatgcgtcaaaaaatgggacaccgcttcgttacgacagtgtccgataaccggtaaatgcgggagcgcggcaataagttgcggcatcgcgttccccataatcagtccacgacccacgctgctcagcatctcgtggtcgttcatggcgtcaccaaaggccatacagtcctgcatcgtcagccccagatgatcgctcagcaccgccagcgcagatcctttgttacagcccaccggcagcacttcaaggcagtccaccgccgagaaggtcaggtgcgcccggtcgcccagcgcctcgttaagctgaatacgcaggcggcagagatcgtcgtgatcgccgcagaagcagatcttggtcaccttgtgtgccggaatgcggcgcaaatcgataagctgatatttaaagccgctgtaaacgtgagcgtgcagcaaggccgggatctcacgcccggtaaaccagccttcatcattaaaaacatgcacgctggcctgcgtatcccaggtgctgtgcaggacaatgtccgccacttccggattcagatcctgacggtgcagcatattgccgtcgacggagtgaatgcgcgtcccgttgccggtgatcaggaacgcatcgagggcaaatgttcccagcagatggcgcatctcgagaacatgacgaccagtggcaaacgtcagggtgacttcacgctcgcgcaggcgcttaagtgtgttcagggttttctcccctaaacggtgatccggcattaacagcgtgccgtccatatcaaatgcagcgagccgagccataattactcccgaaatgtgatgcggttaacttgtgcatcagtattacgtgagatatacggaagtaatagtgaatagatgataattattgttccgggtttttcatgcgccagcttaatcgtcttaaccagtatcagcgtctgtggcacccctccgccggcgcaccgcagcaggttaccatcagtgaacttgccagccgctgcttttgcagcgagcgacatgttcgcaccctgctgcgccaggcgcaggaggcgggctggctaagctggcacgcccgctccggacgaggtaagcgtggggaattacgctttcacgtcaccccggactcgttgcgtaatacgatgatggaagaggccctgaaaagtggacagcagcacaacgcgctggagctggcccagctcgcgcctgaagatttgcgatcgctgctgcatccgtttatgggcgggcagtggcagaacgatacgccgacgctgcgtattccctactatcgctcgctggagccgctccagccagggtttctccctggccgggcggagcagcatctggcgggacaggtattctctggtttgacgcgttttaatggtaacagcagtgaacccacgggcgatctggcgcatcactgggaaatctccgctgacggcctgcgctggcatttctacattcgctccaccctgcactggcataacggcgataaaatagagacggcacagctccggaaaagcctgacggcgctgttgtcgcagcccggcatgggcacgcttttccgcagcgtcttacgtatcgaaaccacgcatccgcagtgcctgacgtttattctccatcaacctgactactggctggcgcacaggctggcaacctactgtagccgtctggcgcatcccgattaccccgtggtgggcagcggtccctttcgactgagcgtttttgagcctgaactggtgcgtctggaaagccacgagcagtatcaccttggccatccgttgcttaaggctatcgagtactggatcacgccccagctttttgactacagtctgggcaccagctgtcgccacccggtgcaaatcgccattggcgaggccgacgagctggccagcctgcggctggtgagtaacagcaccagtctgggtttctgctacctcacgctgaaacagagcccacgtctgagcgaacttcaggcaaagcggctgattaatatcattcatctctcaacgctgctgcacacgcttcccctgaacgaagggctcatcacccctaccgaggaactgcttcccggctgggcgatcccccaatggcctgatttaaccgacgttgcgctgccagaggcattgacgctcgtctaccacctgccggttgagcttcacaccatggccagccagttaaaagcataccttgcgcggcagggttgtgaactgaccgtcatctttcacgacgccaaaacgtgggacgggtgccagcagcttgccgatgcagacatcatgatgggagacagactgattggcgaagcgccagcgtacacgcttgagcagtggctccgctgcgatgcgctctggccgcatctgctgagcgcaccggcatatgcccatttgcaggccacgctggatgcggtgcagacgcaggccgacgaacgtgaccgacacgcaggacttcaggctatattcagccggttaatggagacagccgtcctgacgccgctctttaactaccagtatcaaatcagcgcgcctccgggcgtcaacggcatacgccttaacactcgcggctggtttgacttcaccgaagcctggcttcctcccccaaacgcgtgaagaagctggtcgccgctttagccaggcgttaacatgacgcttttactgtaactgtcgagatgatctatgaaacgtgccgtcgtcgtgttcagcggaggacaagattccaccacctgcctgattcaggcgcttcaccagtatgatgaagtgcactgcgtcacttttgattatggtcagcgtcatcgcgctgaaatcgatgtcgctcgtgaactggccctcaaactgggcgcccgcgctcataaagtgctggacgtgacgctgttaaatgaactggccgtcagcagcctcacccgcgacagcattccggtgcctgattacgaaccggatgccagcggcattccgaacaccttcgtaccgggccgcaacattctcttcctgaccctgacggcgatctatgcctaccaggtgaaagccgaagcggtgatcacgggcgtatgtgagaccgacttctctggctacccggactgccgggatgaattcgtgaaagcactcaatcacgctgtcgatctgggaatggcaaaagagacccgcttcgaaacgccgctgatgtggctggataaggctgaaacctgggccctggccgactactggggcaagctggatgttgttcgcaacgagaccctgacctgctacaacggcattaaaggggacggctgcgggcagtgtgccgcctgtaacctgcgcgcgaacggtctgaatcattattttgcggataaagcgggcgtgatggccgcgatgcagaaaaagaccgggctgaaataagggctacctgaccgtgctgtcgaacggtaagtgtcgacagcacagttatccctgaacatttcttacgcgatcatcagctccagcttttcgcgcaactccccttccagcggcaacgctttctgggttttgagatcgatacagacaaaggtgatcagcgcatcggccaccacctgcccttctggctccagcataacgacctggctcaatacaccacttttgccattcagttgttggacctcactggtcacggtgagcacatcccccagcacagccgggcggcggtagttaatgttgatattgacgaccacaaacgcgatgttgtgtgcggtcagccactggaagctttcgctgttctccaggccgtcccagcgcgcctcttcaagaaattcaaggtagcgggcgttattgacgtgctggtaaacatcgaggtgataaccacggactttgatttgtgtctgcatagcgcaatagccttacgttgttataggttcagaggtcataactggtatgacctctttatcctggcaaatttttgccgcagtgcaagtgattacgcgattacagcgtcaggtgtgcgagattgcgctcaaccagcgcgctgcccatacccggcacctgcttgagatcgtcaagggttttgaaagggccatactcttcacgatagctgacgatggcctgcgctttttttagacccacgccattcataacgcgggcaagatcgtccgcagaggcagtattgatactgacccgcgtaccctcgtcctcaatggctttcgtgctgaccgtcgcgttggctttaacatgaccttgtaacgttgcatcggcctggttttgtgcggcctgcgctttaaccgagggggacgccgccagcgcgcccgcactcatcccggaagtggcaatagccagtgtaattaacagtgctttgattccacatttcatgctgttttctccttgtttgttgacagccacgccacgataaccgcacgggaaaacagggacaaacaacagattgcagaaatggaaaaggccgcgaaagcggcctttagtttttgcagagcgttacgaaaatctgcgagcagatacgtaattattgctcctgagtgaccacatcacccagtttgattttggcttctttacgcaggttgctcatcatcgcttcgaaagcaatctgggcattgttctgggtaattccctgaaccatggccttcttctgcgcgtctggcagcgtaccggcttttacttcatccagcgccagaagcaccacattaccctgcatatcggtcgtggtaccatagacaggtttgtctttcgccggcaggctcaggccaaacgccgcctggctgacaggatcctgaccggtacggctcagcgtttttgcttcgccaaagctcaggccagccgctttcagcgcatcgttcttaccggctttcagatcggccagaattttctctgcatccagttttgcctgctgtgccgctttgttgtgtttgaccagcgccaccacctgatctttcacttccgccaggggcttcactgcctcggctttgtgctcgctgacgcgcagtacgaacgctcggtcaccgtcaacggtaatgatgtctgagttgctgcccggcgtaccgttctcaccgaccagaccaccattgaaaatggcatctgaaactggtttgaagttcagttcttccggcaggttttcgtggctgaaccagcccgtctcaaccgctttaacgccagcagcctgctcagcacccgccagtgattcattgtcgttgcttgcggcatcgctcactttctgttgcagagcatagaaggcgtccagcgctttctcctgcttcactttcgcagcgatatcatcacgaacgtcagccagcggcttggttttcgccgccacaatatcgtccagacgcgccaccaggaaaccaacggaggatttgattacaccagacagttggcctttctctttcaggcctgcatttttcagctcgtccggggtagtggactcttccagccagcccatatcaccgccgtttttggcagaaataatgtcggtggattttgctttcgctaaggtggcgaaatcagcgcctttgttcagctcgtccagcacggctttcgcttctgcttccgttttggtctggatcacgctgtaacggttacgctgcggctgagtgaactgatcctgatgctggtcgtaataagactggatctcggcgtcagtcgcgttttcctgcatcgcagctgcatccagcttgatatagcttacgcggaactgttccggagagatgaagttgttcttgttttgctcgtagtaagcattaacttcagcgtcgctaacctgctgtttcgctgccagtgcgttgacatcaatcgtcgcttcacgcaccacgcgttgctgcgccaccagtgccgccagctcttcagtttcgcctttcagcatgaaatcggtgcccaccaccgcgttgatcagctgttgggtggtcaactggttacgcagcgcctgagcgtactggtcagccgtcatacccatctggttaacaatgctgttgtaacgcgcgttgtcgaactttccattagactggaaagcctgcgtcgagaagatggcttttttaacctgctcatcgctgatgcccagacccaggcttttcgcgtactgatccagcagcgcttcgtcgataaggcggttcagcgtctgctgacgcaggtttttcatatagccttcgttggctgcaagttcagagtattggtcgcccagctgttgctgcatgcggttacgttcaccagcaaaagcgttctcgaactgcccacggctaatttcctggccattcacttttgcggcgtagttcgcgccaccgccgatgaggtaactactcacaccggtcaatatgaacgacacgataatgataccgaaaataatcttgagcacgagactgttagcagccgtgcgtaagctgtccatcatggtgtaacaacactccgctgtaggtgactggttacctgacgctgacggaaaatcctgaccgtcgcgcgtaaaggcgtattgtgacaagaaaacagggcaattgtcagcccacaactcgcataaactcgcacaaatcaggtctggacaaacaaaaaaggcacatcaaacgatgcgcccttgtacttttcagcttccctggagcgggaaagcaatcagtttactgcgtctttcagcgctttacctgcacggaaacccggcactttagcggcagcaatggtgatctctttaccggtctgagggttgcggccagtacgggctgcacgctctttaaccgcaaaagtaccgaagcctaccagtgcaacgtcgtccccagcttgcagagattcagtaacagaagcaattaaagcatctaaagcacgtcccgctgcagctttagaaatatcagcacccgcagcaattttgtcaatcagttgagatttattcactgttctcttcctctctttataatttatatcgcacctgaatccttcacagcgcgaccgcgcagcagttatatcagtcctgctatgaccttacaacacccgttgttgatggctaacccaatcagcaatctaaattagctatacaaaaaaaggctggcaagtacgaaatgacttaccagccttgtttttattggcgctctttgcgcgaggtcactattttgcggttacaacctgcattccggacggttcattttgcagtgcgagagtcagaacttcctcaatgcgtttcaccggatggatctgcaaatcggcaataacgttgtccggaatctcttccagatcgcgtttattttcgtaagggatcaatacggttttgatcccaccgcggtgtgccgccagcagtttttcttttaacccgccgataggcagtacctgaccacgcagcgtaatttcaccggtcatggccacatcagcacgaaccgggttccctgtcaggcaggaaaccagcgccgtacacatggcaatacccgcgcttgggccatctttcggcgtcgccccttccggaacgtgaacgtgaatgtcgcgtttttcgtagaaatccgggttgatacccagtttttccgcacgcgcgcgcaccacggtcagcgccgcctggatggactcctgcatcacttcacccagtgaaccggtgtaggtcagcttgcctttgcccgggacacaggcggtttcgatggtcagcagatcgccgcccacttccgtccatgccagaccggtcacctgaccaacgcggttttcgttgtccgcacgaccgtagtcgaagcgctgaacgccaaggtaagcatgcagattgtcgccgttaatcacaatgtgcttcaggctcttatccagcagcagctgtttcaccgccttacggcacagcttagagatctcacgctcgaggctacgaacgcccgcttcacgggtgtaatagcgaatgatgccgataatcgcgctgtcctcgacggtcagctcgttggctttcagcgcgttacgctcaatctgtttcggcagcaggtgctgcttagcaatgttcagcttctcatcttcggtataaccggagagacggatcacttccatacggtccagcagcggggccggaatgttcatggagttggaggtcgccacgaacatcacatcgctcaggtcgtagtccacttccaggtagtgatcgctgaacgccacgttctgttctggatcaagcacttccagcagcgccgacgccggatcgccacgcatgtccgaagacattttgtcgatctcatcgagcaggaacagcgggtttttaacccccactttcgccatcttctggatcagcttgcccggcatggaaccgatataggtgcgacgatggccgcggatttccgcttcatcgcgtacgccgcccagcgccatacggatatacttacgtccggtcgctttggcgatggactggcccagagaggttttacccacgcctggaggccctaccaggcacagaattggacctttgattttgttcacacggctctgtaccgcgaggtactcaagaatgcggtctttcacgcgttccaggccgtagtggtcggtatcgaggatttcctgcgcctgacgcaggtcttttttgaccttgctgcgggcattccacggaacctgcaccatccactcaatatagccgcgcacgacggtcgcctctgccgacatcggagacatcattttcagcttctgcaactcagcttcggctttctctttcgcctctttcggcatcttcgccgcgtcgatcttacgcttcagcgcttcgttttcatccggcgcatcgtccatctcgccgagctctttctgaatggctttcatttgctcgttcagatagtactcacgctgcgatttttccatctgctttttgacgcggttgcgaatgcgcttctcaacctggagcagatcgatctcagactccatcatcgccatcaggtattccagacgttcgttaacgtcggacatttccagcacggactgtttgtcagcaagcttcagcggcatgtgcgcagcgatggtatccgccagacgtgcaggatcgtcgatgctgttcagcgacgtcagcacttcaggtgggattttcttattcagcttgatgtagccttcgaactggctgatcgcggtgcgtaccagcacttcctgttcgcgctcatcaagttccggtgaatcaaggtactctgccttcgcagagaagtgctcgccatcgtctgacagagtggtaatacgcgcacgctgtaagccttccaccagcaccttcacggtgccgtctggcagcttcagcatctgcaaaatagaggccacggtcccgacggtgaaaagatcgtttacacccggctcatccgttgatgcttccttctgcgcgaccaacatgatttttttatcatgatccatggcggcttcgaggcaacggatagatttttcccgccctacaaataagggtatgaccatgtgcggataaaccaccacatcgcgcaacggcaatacggggatttcaatgcgttcagaacgctcaggattcatagagctctctcttagtttagtgtccgccaggtaaactggtcatgtaactgtgcttcacacaaccattaacatgtaatccagtatatggggatgtttcccatacattcaacgccatgaatacggaaaaagtaaaggggagataaaatcccccctttttgattaactgattgtatgaaatggtgaattattcgccagatgcctgctgcgcttccggtttaccgtaaatcagtaacggcttggactggccaccaatgacggactcgtcgatcacgactttttcaacgtcttccatagaaggaagatcgtacatcgtgtcgagcaatgctgcttctacgatagaacgcaggccacgggcaccggttttacgcgccatcgctttcttggcaatcgcgtccagtgcttcgtcacggaattccagctcaacgccttccagattaaacagcgcctgatactgcttggtcagcgcgtttttcggctctttcaggatctgaatcagcgcgtcttcgctcagttcgttcagggtcgccacaaccggcagacggccgataaattccggaatcaaaccgaatttgatcagatcttccggttcaacctgcgccagcagctggccttcgtttggtttttcagacgtggctttcaccgttgcgccaaaaccaatgccggagccggtttccacacggtgagagatcactttatccaggcctgcaaacgcaccaccacagataaacaggatcttggaggtatcaacctgcaagaattcctgctgcggatgtttacgcccaccctgcggtggaacagccgcaaccgtaccttcaatcagcttcagcagcgcctgctgcacgccctcgcccgagacgtcacgggtgatcgacgggttgtctgatttacgggagattttgtcgatctcatcgatatagacgatcccgcgctgggctttctgtacgtcgtaatcgcacttctggagcagcttctggataatattttcaacgtcttcacccacataaccggcttcggtcagggtggtggcatccgccatggtgaacggaacatccagcaggcgcgccagcgtttccgccagcagggttttaccagaacccgtaggcccgatcagcagaatgttacttttgcccagctctacgccattgctggtatcgccgttacgcagacgtttgtagtggttgtataccgccaccgccagcacttttttcgcctgctcctgaccaatgacatagtcgtccaggtggtggcgaatctcgtgtggcgttggtaacgcgctgcgctcacggtgcggcgcgacttctttaatctcttcgcgaatgatgtcgttacataaatcgacgcattcgtcgcagatatacacggacggcccggcaatcagtttacgcacttcatgctggcttttgccgcaaaaagagcagtacagcagtttgcccgaaccatctttgcgtttatctgtcatgagtccaaacctctttttaagttctatgtgccgcacatgacgacgcaaatgccattctcagacgcaagctgcttacaggcaacgttccgccctaccttagtatagcggcacactcgcgtcgcgggcatcaattacgatgggtcaaaatggagtcgactaagccgtactcaactgcctctggtgcagagaggaagcgatcgcgctcggtatcgcgctcgatctgctcgagaggttgacccgtatgctgcgccataagttcattcatgcgcgcttttactttcagaatttctcgggcgtggatttcaatatccgtcgcctggccctggtaaccacccagcggctggtgaatcatcacgcgggagttaggcaggcagaaacgcttacctttcgcccctgcggttaacaggaaagcacccatggatgccgcctgccccatacagatggtactgacatccggcttgatgaattgcatggtgtcataaattgacatgcccgccgtaatcacaccgcctggcgagttgatgtacaggtaaatgtcttttccgggttttccgcttccaggaacagcatctgcgccacgatcaggttagccatatggtcttccacctggccggtcagaaagataacgcgttccttgagcagacgggaatagatatcgaaagaacgctcaccgcgtgaggtctgttcaataaccattggcaccagcgccatatggggtgcaaagttatctcgttcgccactgtatgacatttccgtctcctggttcaaaattgaaaacacctgctgtactgattgtaaccttatggacggattatcagccagtctcaatcatcgtgattacatactaatgggggtcgtcatgccctatttcaagcataacaacgttttgttgtaacgctaacactgaaagggcgttttagcacccttccaggactaaagctgtgataaaaaaaacccgtcgccggagggcaacgggttttttgttcaaactttaaaccgtcggggcgaaattacgcctgctggttcatcagttcggtgaaagaggtctctttttcggtcactttcgctttcgccagtaccgcttcaacagcctgctcttccagtgcgacgttgcgcatgttgtccatcagctctttgttcttaccgtagaactcgatcacttctgatgggtcttcgtatgcagaagccatctcttcgatcaggcctttcacacgctcttcgtcagctttcagctcgtgggtacgaatcacttcgcccagcagcaggccgacaacaacgcgacgtttcgcttgctcttcgaacagctcgcgtggcagttccatcgcttgctgctggttgccaccgaagcgctgtgcagcctgacggcgcagaacgtcgatttcgctgtcgatcagggcagcaggaacgtcgatgtcgttcgctttcaccagaccttcaatcgcctgagacttcacgcggttacgtacagcgccgttcagctcgcgctccatgtttttacgcacttcggtacgcaggcccgcaacagaaccatcttccacgccgaaacgcttgatgaattcttcagtcagttctggcagttcgcgctcttccactttcttcaggttgataacgaacttcgctgctttacctttcaggttttcagcgtggtattcttcagggaaggtcacgtcaatggtgaactcttcgcccgctttgtggcctttgataccgtcttcgaagcctgggatcatacgaccctggcccatcgccagtacgaagtcagacgctttaccgccttcgaactcttcgccgtctacagaaccggtgaagtcgatggttacgcggtcttccgcgtcaacagcgccttctttctctttccagttcgcctgctgcttgcgcagggtatccagcatgccgtcaacgtcttcgtcagtcacggaaacgatcggtttttcaacttcgatagattccagacctttcagctcaacttccgggtacacttcgaactctacggagtaggtgaagtcttcgccctgcttgtattcacctggaacgtagttcggcgcgccggctggattgattttttctttgatgatcgcgtcgataaagttgcggctcatcagttcacccagcacatcttgacgcacggaagcgccataacgctgagcaacaacattcattggtactttgcccttgcggaagccgtcaatacgtactttttttgctacgttgaccagctcgcttttcacagcagtttcgatgctgtcagcagcgatagtaatcgttacacggcggccaaggccttgagtggtttcaactgaaacttgcatcttgttacctcaaaaaaatcacagtgctcggtcaactctgaatctgtctgttataccgggatgctctcttatgtgcagattcacattccctgtcgccagaatcatcccgaagacattcaataagacgcggcattatagcggcatcacttaggtgagtcgagaacggttggagcatgttgctgcggcttttttcacactttaaggctatttttagccttaaaaacgcgccatccgctcaaaactcagacaaaacaaaacggcctgaaggccgttttgacgaaatctgtaagcaacatactggaaaaactccggcggttgcaaatccgatttatcaggcgatggtgcctgccccccgacaaggcggtgatgcgaataccgtatcctgtagcccttcccattccttaatggtgtaggtatgcagcgccagcgcatgtacggttgtggagagttcttccgtcaaggtgctgtagatcaagcggtgtcggttcaggaaacgttctcccgtgaagcgatcgctgaccagaaccactttaaagtggctttcagaacctgccggcacgttatgacgatagctttcgtcgacaacttcgagaaacacagggttaaacgctgcccttaatttttcttctatctgttcacgtatcatcatgaaatcactcctccgacaacgctaaggtgtcacccatccctttaaatattagccgcttttaccggttccattacaccttgacaacaaatatttagctttcgtctgattttctcatccaaacgaatgaagttcactatgaggttcatacgttttgtcacttacaggcagagaaaagcggaaaggtggtcagttttcggacaaggcgatgaatttacatgcgttgaccacttcccctggccgttagcgatgttatgatggcggcaatttttctctctttgcttacgattcgttgagaacccgaaaatgttaaaaaaactcttctttccgttggtagcactctttatgctcgccggctgcgcgactccgccgacgaccattgacgtttcaccaaaaattaccctgcctcagcaggatccaagcctgatgggcgtcacagtcagcattaatggcgccgatcagcgtcaggaccaggcgctggcgaaagtgactcgcgacaaccagcaggtcacgctgaccgcctcccgcgacctgcgcttcctgttgcaggaagtgctggaaaaacagatgacctcccgtggctacatgattggcccaagcggcgcggttgatctgcaaatcatcgtgaacaacctgtacgctgacgtctcccagggtaacgttcgctacaacattgcgaccaaagccgatatcgccatcattgctaccgcgaagaacggcaataaaatgaacaaaaactaccgtgcaagctattccgttgaaggcgcattccaggcctccaacaaaaatatcgctgacgcggttaacagcgtgctgactgacaccattgctgacatggcacaggacaccagcattcacgacttcatcaagcagaacgcccgttaatcctgctgactgacccggtgcttcaccgggtcagttcataagaacatgtccagtcactacttacgtattttccagcaaccgaaatcagctattctgctgatccttggtttcgcctccggtttaccccttgcgctcacctccggcacgttacaggcgtggatgacggttgagaacatcgatcttaaaaccattggtttcttctcgctcgtcggccaggcttacgtctttaagttcctgtggtcgccggtgatggatcgctataccccaccgttcctcgggcgccgtcgcggctggttagtgatgacgcaggtgctgctgttgctggccattgccgcaatgggtttccttgagccgtcaacacagctgcgctggatggccgcgcttgcggtggtcatcgccttctgctccgcttcgcaggacattgtttttgacgcctggaagacggacgtcctgccagcagaagagcgtggcgccggtgcggcaatcagcgtgcttggctaccgcctgggtatgctggtttccggcgggctggccctctggcttgccgaccgctatctcggctggcagggaatgtactggctgatggccgctctgctgatcccctgcattattgccacgctattcgcgcctgaaccgagcgatgtgattccggtcccccgctcgctggagcaggccgtcgccgcaccgctccgcgatttctttggtcgcaataatgcctggctgatcctgctgctgattgtcctttataagcttggcgacgctttcgccatgagtctgaccaccaccttcctgatccgcggcgtcgggtttgatgcgggcgaagtcggcgtggtgaacaaaaccctggggctgtttgccacgatcgtcggcgcgctgtacggcggtgtattgatgcagcgcctgacgctgttccgcgctctgctgatcttcggcatccttcagggcgcatcgaatgccggttactggctgctgtcgatcaccgacaagcatatgatcagcatggcgacggcggtattctttgaaaacctgtgtggcggtatgggcactgcggcatttgtcgccctgctgatgacgctgtgcaataagtcattttccgccacccaatttgcgctactgtctgccctttctgccgtcgggcgcgtatacgttggccccgtcgcgggctggtttgttgaagctcacggctggccgacgttttatctcttctcggtggtggcggcggtgccggggattttattgctgctggtctgtcgccagacgctggaatatacccagcggacggaacacttcatgccgcgcacggaatatcaggctgcctatcggtttgccctgcgtctgctgatggctggttgtcttgcgctggtagtgtggctcgcggtactcatctcgaatgcgacgaccaccttgtcgcttccgtttgaaacccagctgcttgatgcaggggtgttactcgccattgtgggtatcctgaccggtgggatgctggatttcatgtcattgcggaaaacgcagatgacatgaagtaaaaagcgaaaggttatttcccgttgtaataacgacacgaaattataacggcgaaaataaccgccatcggcaaaaaaaatatttgttgttttgtgcgggatagcattcggaaattattggagcttatttcgatacgctattttccgttaaacgattcagcattcgaaagattgaattttcgttttttagttgtctttttattgataattaattgttaattatttgtgtgtttttcacaatggttataccaattgtcccttttgcggtatgctggggcaccctttcgttataacgcccgctccgtgcggcttcccccggaaaacgcgacataatttgcaacacttgtgacatgtgcggcagaacccggtaacaccttcctgacacagggctaatgatgtttacagtaatgtaaccttcccgtaaaatgcccccacactttaaacgccaccagactcccgtggaattgaggtcgttaaatgagactcaggaaatacaataaaagtttgggatggttgtcattattcgcaggcactgtattactcagtggctgcgattctgcactactagaccccaaaggacagattggactggaacaacgttcattgatactgacggcttttggcctgatgttgattgtggttattcctgccatcttgatggctgttggtttcgcctggaagtatcgtgcgagcaataaagatgcgaagtatagccctaactggtcacactccaataaagtggaagctgtggtctggacggtacctattctgatcatcctgttccttgctgtactgacctggaaaaccactcacgcacttgagccgagcaaaccgctggttcacgatgaaaaacctattaccattgaagtggtctccatggactggaaatggttcttcatctatccagaacagggcattgctaccgtgaatgaaatcgccttcccggcgaacactccggttcagttcaaagtgacctccaactccgtaatgaactccttcttcatcccacgtctgggcagccagatttacgcgatggccggtatgcagactaacctgcacctgatcgcgaatgaagcaggcacctacgacggtatctccgccagctatagtggcccgggcttctcgggtatgaagttcaaagctatcgctacgccagaccgcgcgactttcgaccagtgggttgcaaaagcgaagcagtctccaaacaccatgtctgacatggcggcgttcgaaaaagtggctgcacctagcgaatacaacaaggtggagtacttctctaacgtgaaaccgaatctgttcaaagacgttattggcaaatttatggatcacggcatgagcatggacatgacccagcctgaaggcgagcacaacacgcaccagggtatggaaggcatggacatgagccacgcggaaaccgctcactaaggggccgaggaagaaaatgttcggaaaattgacactggatgcagtgccctaccatgaaccgattattatggttacggtggctgcaattatcattggtggcgcggccttagttggcctgatcacttacttcggtaagtggagctacctgtggaatgagtggctgacttcggttgaccacaaaaaactcggtatcatgtactgcatcgtcggtatcgtcatgttaattcgtggctttgcggatgcaatcatgatgcgtagccagcaggcgcttgcgtctgcgggcgaagccggcttcctgccaccgcaccactacgatcagatctttaccgcccacggcgttatcatgatcttcttcgtggcgatgccgctggtaatcggtctgatgaacgtggtcgttccgctgcaaatcggcgcgcgcgacgttgcgttcccgttcctgaacaacctgagcttctggttcacggttgtcggcgttatcctggttaacctnnnnnnnnnnnnnnnnnnnnnnnnnnnnnnnnnnnnnnnnnnnnnnnnnnnnnnnnnnnnnnnnnnnnnnnnnnnnnnnnnnnnnnnnnnnnnnnnnnnnnnnnnnnnnnnnnnnnnnnnnnnnnnnnnnnnnnnnnnnnnnnnnnnnnnnnnnnnnnnnnnnnnnnnnnnnnnnnnnnnnnnnnnnnnnnnnnnnnnnnnnnnnnnnnnnnnnnnnnnnnnnnnnnnnnnnnnnnnnnnnnnnnnnnnnnnnnnnnnnnnnnnnnnnnnnnnnnnnnnnnnnnnnnnnnnnnnnnnnnnnnnnnnnnnnnnnnnnnnnnnnnnnnnnnnnnnnnnnnnnnnnnnnnnnnnnnnnnnnnnnnnnnnnnnnnnnnnnnnnnnnnnnnnnnnnntctccggtgtcggtaccaccctgaccggtattaacttcttcgtgaccatcctgaagatgcgtgcaccaggtatgacgatgttcaagatgccagtatttacctgggcatctctgtgcgccaacgtcctgattatcgcgtcgttcccaattctgaccgtcaccatcgcgctgctgaccctggatcgctatctgggtacccatttcttcacgaatgatatgggtggcaacatgatgatgtacatcaacctgatttgggcctggggtcacccggaagtgtacatcctggttctgccggtgttcggtgtgttctccgaaatcgcggcaaccttctcgcgtaaacgcctgtttggttacacctctctggtgtgggcaaccgtatgtattaccgtcctgtcgttcatcgtctggctgcaccacttcttcaccatgggtgcgggtgccaacgtaaacgccttcttcggtattaccaccatgattatcgcgatcccgaccggggttaagatcttcaactggctgttcaccatgtaccagggtcgtatcgtgttccactcagctatgctgtggaccatcggcttcatcgtgaccttctccgtaggtgggatgaccggcgtactgctggcggtaccaggtgctgacttcgttctgcacaacagtctgttcctgattgcgcacttccataacgttatcatcggtggcgtggtcttcggctgcttcgctggtgtgacctactggtggccaaaagcgttcggtttcaccctgaacgaaaaatggggtaaacgcgcgttctggttctggatcatcggcttcttcgtggcgtttatgccgctgtacgtgctgggcttcatggggatgacccgtcgtctgagccagcagatcgatccgcagttccacccaatgctgatggttgcagcgggcggcgcagcgctgattgcctgcggtattctgtgccagctgattcagtactacgtgtctatccgtgaccgtaacctgaaccgcgacctgaccggtgacccgtggggtggccgtacgctggagtgggcgacctcttctccgcctccgttctataactttgccgtagtgccgcacattcacgagcgtgatgcattctgggaaatgaaagaaaaaggtgaagcgtacaagcaacctgagcattacgaagagatccatatgccgaaaaacagcgccgcgggcatggttattgccgctttcgcaacggtatttggtttcgcaatgatctggcacatctggtggatggcgattgttggcttcgctggcatcgtaatcagctggattgtgaagagctttgacgaggacgtggactactacgtaccagtccgtgaagttgaaaagctggaaaaccagcattttgacgagatttctaaagcggggctgaaaaatggcaactgatactctggcgcactcaactgcccacgcgcatgaacatgcgcaccatgatacaggaccgacgaaagtcttcggtttctggatctacctgatgagcgactgcatcctgttctgctgtctgttcgcaacctatgccgttctggtgaacggcacagcgggcggcccgaccggtaaggacatctttgaactgccgttcgttctggttgaaaccgcactgctgttattcagctccatcacctacggcatggcggctatcgccatgtacaaaaacaacaagagccaggttgtctcctggctggcgttgacctggctgtttggtgctggctttatcgggatggaaatctatgaattccatcacctgatcatggaaggtttcggcccggatcgtagcggcttcctgtcagcgttcttcgcgctggtaggcacccacggtctgcacgtgacctcgggtctgatctggatggcggtgctgatgttccagatctcccgtcgcggcctgaccagtactaaccgtacccgtattatgtgcctgagcctgttctggcacttcctggacgtggtatggatctgtgtgttctctgttgtctatctgatgggggcgatgtaatgagtcattctaacgatcatggcgcttcccatggcagcgtaaaaacctacatgacaggtttcatcctgtcgatcattctgacggtgatcccgttctggatggtgatgaacggttctgcatctaagccggttatcctgggcgcaatcctggtgaccgcggtgattcagattctggtgcatctggtttgcttcctgcacatgaacaccaagtccgatgaaggctggaacatgacggcctttatctttaccgtgattatcatcgctatcctggtagtcggttccatctggattatgtggaaccttaactacaacatgatggttcactaagagcggcgagtatgtttaagcaatacctgcaagtcacgaaaccaggcatcatctttggcaacctgatctccgtaatcggagggttcctgctggcctctaaaggcagcattgattacaccctctttatttacacgctggtcggtgtgtcactggtggttgcgtccggttgtgtatttaacaactacatcgacatggatatcgacaagaagatggaaaggaccaaaaatacggtgctggttaaaggcctgattgctccttccgtctcgctggtgtacgccaccttgctgggtattgctggctttatgctgctgtggtttggtgctaacccgctggcctgctggctgggggtgatggggttcgtggtgtatgtgggcgtctacagcctgtatatgaaacgtcactccgtctacggcacgctgattggttctctctccggcgctgcgccgccggtgattggctactgcgccgtcacgaacgagttcgacagcggtgcgctcatcctgctggctatctttagcctgtggcagatgccgcactcctacgccatcgcgattttccgctttaaggattatcaggcggcgaacattccggttctgccggtcgtgaaaggcatttcggttgccaagaaccacatcacgctctacatcatcgcttttgccgtggcaacgctgatgctctctctgggcggttacgccggatataaatatctggtggtagcagctgcggtgagcgtatggtggctcggcatggccctgcgcggttataaagtggaagatgacaaggtctgggcacgcaagctgtttgtgttctcgattgtcgccatcacctccctgtccgtgatgatgtccgtagacttcatggtgccagattcacaacacctgctgacttacgtctggtaagaagactgatgtaaaaacgccgggtttagcccggcgttttttattggtacggcgtaacccctttctttaacagtatattgccgtatttcgcggtctcgcccgtcaccacgatggcgtacgctttctgtgcccgcgcataaaacgcataacggtcaatacgcgtaaccccctccccttccgcctcaccaaagagtgcgttgcgatagcgcgcttctacctgtatatcgagcgtatccccgtcgacaggggccatcatcaccagcggtggcgcatagctgtccagttcaaacagcggtatcaccgcggccagcaaatcgctgatgagcaggccatctgcgcggatcgtctttggccccaggctgtgcgcgggaaagtgagcatctgcaaaaataatctcgtcaccatgacccatttctgccagcgttttcagcagctcgggtgaaatcagaggggatatcgttttaagcacaaggttgctcctcaggatagaaataacggtaacgatagtggacccgatcgcgagcagcctcagcgctggccgtttctccgacgccccaccatccgtacaaagacgcccccagcacggtcgtatcagcctcttcaagaaccttcaccgggatcccaagcgcattggacttgagctgattccacagcatattgcggctacctccccccaccagcaggagttcacgcgccttaaattgcgcgatcgcctccagcgccaggcatttttcttgcagatgcaccgtgagtccttccagggctgcgcggtaaaaatgggctggcgttgtggtgagcgtaacgccctgccagccggcgagtggagaatcgagcagttgggtattcatcgtgacgccatccgcgccgttcggaattgccgccgcctgagccagaatagtgtcccagtcggtaccaggcgaccagaacagcgcgcggatccactccagtacgccagacgccagatattgcattcccggattatagagccccgtccggctatccagttcgcaggttgcgcccgggtattgccccagcaaagcggtatcaacctgcgtggtgcgcgccattaaaatctcccaggtacccgaagagagaactggctcattaattcccgccccggcgccaaaaagggcaaactgcgtgtcgtgcccggcggagatcaccggcacaccgcaaggcaatccaagcctggatgcagcgtcgggccgcaattcaccaatcctttctccgggggaaaccagcggcgggaaaagggaatgaggcacgccgatcttgcttaagatcgtttcactgaagcgctgctgatgcagatcgaacatctgactggtaccggccatcgtgagatcggtcgtcatctttccggtcaggcgatggttgattagcgaggagataaaaagccaggcgtgagcacgctgtaacagatcgggatggttgtcctgaagccagcctagcttatacaacgtgttaaaactaaactgcccaacgccggtgatctgctgtagttctgccggggagcatgaacgggccaccgcttccatcaccggcacggttcgtgggcacttccagctgatgatcgggtaaagcagttctccccgctcatctaccagtgcgccatccacgccaaaggtcgtcacactcattccgcacagctgatgctcgctcagcgctgcgctgattttctgacaacagacggcaaaccgttgcatgatggcgtcgagcgaccactggtgccaggccggattttcagcggcgctttcgctttcgttcgccactgcggcgcgcgccacaatattcccttcaggatccagcgcaatggcgcgcacgttcgtcgcgccacaatcgagaaccagaaaacattttttcatcgcggtccccacaggctgccagcccgccggagcaggctggcaggccggcttaatgtttgtataacggtccgtaattttcacaggcgcggtaatcctgcccttccggatccataccgtgagcgccccaggccgtcggccgataaatcagcgcctccggtacgttatgcatgcatacagggatgcgtagcatggacgccagggtgatgaaatcagcgccgacgtgcccgacggttaataccccgtggttagcgccccagttcgccatcactgaatagacgtcgctgaacgggcctttaccggtcaggcgtggggcaaaccaggtggtgggccaggttgaatcggtgcgcttattcagaatgtcatgtacgtgttccggcagctcaacactccagccttccgctatctgtaataccggacccacacccttgatgaggtttacgcgggtcatggtaaatggcacgccaccccgggtgaggaagtttgatgagaaaccgcccccgcggaagtattcatgcaccgccggacaccagtgggttgcggccaggcacgcgttggcttcctgctcagtaatgtcccagtgtggtttcagggtcggtttcccctcggcgtttttctgctccgctgtaccgtccagcgccgccgagccggagttgatcagatgaataatgccgtgctcagcccgtccagtgagcttctggccggtaacacgctcaaccgactccggcgaccagtaggtgcgtacatcagcaaaaatctgcgcggtgccggtcatcagatgcccaaacagcatcgctaccccgttaaggctgtcattttccgtcgccactaccaacggctggcgaataccgttccagtcgaaagagctgttcagcagcgcctctgcggtatcaccatttggatactgatccgtccagtggcgctgcccctggaaaccggacgcaatggcgttatagcccagcgattcctccacgcggcccatcgcagcgagtttagggttgccctgcatcatgtcgcggatgcacatcgccattagcaggctctcccgcaggatcgcggcattttcctgttcattgcgacgatactgctctgcgtttttatcctcgccgaaacggaaatgtgccttcgcccagctcagggccagctcaagttcttgctcgtcgtaaatcttatgatcgatgcggcgacgcagttcggtcatatccaccgcctgcaccttcatccccagccaggattcaaagaagttgtgatcgacaatcgagcccgcgatccccattgagacaccgcccaccgacagataacttttccccttcatgctggcgaccgccaggcccgcccgggcgaagcgcaacaatttttcctcaacgtctgccgggatggtctcgtcgcccgcatcctgtacatcgtggccgtaaatggaaaacgccgggatccctttctggttatgcgctgccagcgccgctgcgaggtataccgcccccggacgctcggtgccattaaagccccagatcgctttcgggcgcagcggatccatatcaatggtttcactcccgtaacaccagcagggggtgatggtgatcgtcagaccaacgtggcacgtgctgaacttctcttcgcaagcggcggattccgccattccggcaatgcagctgtcggcaattacgcactctacgggcgtaccgcaggggtggcgtaatttttcactgagtagcgccgccgtggctttcgccatgttcatggtctgctcttccagagactcgcgtacgcccattcggcggccatcaataacaggtcgaatgccaatccggggtaacgcttttatcgttttcatagcccttcctcacgttggttaacctatccgtctcaggggcatagccgtgaaaaagcgcccgggcagcaccgtgaacggaaaatggtgaaacttgctaactcgaattagcttagggttctcactaaaaatgagacaagataaatgtgcaggatctgtgagcagtttcacgatgagaggtcaaaattcgatcagcgtcaggtattacgattcagcaaaatctaaacatatcgtttaaattcaattaaataacaaaatacctttgcacgacgtcacaatttgaatacaaatgatttggctaaattatgaccctaaaatagcttttaaggacgaaagctaagtcgagttagcttaataactaaatcactatggcttgtgattcattgcctttccaacacaggaattttgcaatgtcagagactcttattcagatgacgcgcatcaccaaacgctttcccggcgtgctggcgctgaatcaggttgatttcgatttacgccgcggcgaagttcatgccctgttaggtgaaaacggtgccggcaaatcgacgctgatgaaaatattatccggtgtttaccaacccgattccggtgaaattcgctttgaagggcaatccgtatcattcagcgatccgctaagtgctcagcacgcaggtattacgattatccatcaggaatttaatctctttcccgatttaaccgtggaagagaatatctttattggccgtgaattctgcaaaaatagccgctggcagttagataaacgcgcccagcggcaggcggttgagaaaatactgcacacgctgaatttaaaaatcgccccggacgcccgcgtcagtgaattaaccgtagcccagcagcagatggttgaaattgccaaagcgatttcggtcaatgccaaagtgctaatcatggatgaacccaccgccgcgctgaccgaaagtgaaatcgagagtttatttgacgtcacgcggatgctcaaggctcagggcacggggatagtctacatctcgcaccgtctggaagaattggcgctgatcgccgatcgcgcgaccgtcatgcgcgacggacaatacatcgccaccgtagattatgaaacggttcagatcggcgagcttatcgccatgatggttggccgcaatctcgataacatctacccaaaacgcccgccgcatcagcgcagagaaaaagtgctggaggtgaatggcctgacgcgaaatggtgtactgcacgacatcaactttaccctctggcgcggtgagatcctcggcctcgctggcttaatgggcgcaggccgaacggaactgggccgggccctgtttggcgccgatgcgatcgacgccggtaccctgacgctgaacggcacccccacacggattaaagacgtggctgacgccattgagaaaggcatcagctatttaacagaagaccgcaaaaaagagggactcgccctcggcctttccgttgagatgaacattatgctcggcaattannnnnnnnnnnnnnnnnnnnnnnnnnnnnnnnnnnnnnnnnnnnnnnnnnnnnnnnnnnnnnnnnnnnnnnnnnnnnnnnnnnnnnnnnnnnnnnnnnnnnnnnnnnnnnnnnnnnnnnnnnnnnnnnnnnnnnnnnnnnnnnnnnnnnnnnnnnnnnnnnnnnnnnnnnnnnnnnnnnnnnnnnnnnnnnnnnnnnnnnnnnnnnnnnnnnnnnnnnnnnnnnnnnnnnnnnnnnnnnnnnnnnnnnnnnnnnnnnnnnnnnnnnnnnnnnnnnnnnnnnnnnnnnnnnnnnnnnnnnnnnnnnnnnnnnnnnnnnnnnnnnnnnnnnnnnnnnnnnnnnnnnnnnnnnnnnnnnnnnnnnnnnnnnnnnnnnnnnnnnnnnnnnnnnnnnnnnnnnnnnnnnnnnnnnnnnnnnnnnnnnnnnnnnncgggtaatgtcgatgaaaaacgctgccgggagtccagccagaaactggtggatgcgctgcgaataaaaacgccgcatctggaacaggcggcactgaatttaagcggcggtaatcaacagaagatcattattgcccgctgggtctgtaaagataccgatattttaatttttgatgagccaacccggggaattgatgttggcgccaagctggaaatttatgaactaatgaaccgccttgtcgctaaaggtaaatcgatcatcatgatttcatccgaactgccggaagtattaggaatgtgcgaccgcatacttgtgatgcgcagcggccacattgccggcgaaatagaggctgagcacgccacccaggaaaaaatcatgcaatacgccacgctggaggattaatcatgtccgttaccgttccatcgccgcaaagcggaagtcatacgatgaaaataaataaagcgctcctgatgcgtctggcgcctctttttagcctggtattgctggttctgtttttcagcttcagctcaccgttcttctttaatactgaaaatatcatgactatcgccctgcaaacggcggtgattggcatcatggccattggcgtaacctttgtgattattaccgccgggatcgacctgtcgctcggatcggtggtggcgttctcaggggttgcggtgggcatcgccgccgggtttggtatgccgctgccggtctgtattctggcaggcgtgctcgccggcgggctttgcggctatgtgaacgcgtttctggtcaccaaaatgaccatacccccgtttattgccaccctcggcttaatgatgtcggtacgcggcatcaatatggtgatgaccgatggccgcgcgatttatttttctgactacccgcagttcaagctgctagcgcagggtcgcctgttcgacgtcctgccttacccggtgttctacctggtcatcgtggcactgatcgccatgtggatcctgaagaaaacggtgatgggccgctatatctacgctgtcggcagcaatgaaacggcggcacatctttccgggatcaaagtccagcgagtgaaaattttcgtttacgccttatgcggcctgttaaccggcgtggccggggtgatcctcgcctctcgtctcaattcaggccagccaaccgtaggcgtgggttatgagctggaagccattgcggcggtagtgattggcggtaccagtctgatgggcggcgtgggcacgattggcggcaccatcataggcgcgttcattatgagcgtgctgaaaaacggcctcaatctcatgggcgtgtcccagttctggcagatggtggcgatgggcgtggtcgtcgttgccgccgtctacctggacacgttacgtaaaagaatgcgttaggttctcgatacaacaagccctgccaaccctacaacggagcaaaataatgaaaaccagccatatcctgagcgccctgtcgctcgttgccatcctgtccagcagcgcgctggcaaaagatttgaacctgccggtagtcagtaaaggttaccagcacgaattctggcagacggtcaaaatggggacggaagctgccgcaaaagagttgggtgacaaaaccagctacgttggccctgccgatgaaacgcaaatcgccgagcagatccagttagtcgaaaacaccatggcacaaaagccaaacggcctgttgctggccgcgcttgatgcaaacgcccttgccccgctggtcgaaaccgccaacagccgggggatcaaagtggtgaccttcgactcgggcgtgaactccgatatcccggccagctttgtcgccaccaataaccgtaaggcgggcgcacaggctgcggatgcgctggcggagcaggtaggccagaaggggaaagtgggtattatcgcccacgtagccggaacgacgtccgccattgagcgctctgaaggattcagcgagcgaatgaaagagaagtacccgaatattcaggtactgccggtgcaatatagcgatggcgacccgcaaaaggcgatggataaaaccattgatatggttcaggccaacccggatatcgccggtatttatgccaccaacgaaggctcaaccctgggcgttgcgaacgctatcgacagccagaatctgaagggcaaagtgaaagtcatcggttttgacagcaccgaagccatcattaacttcctcaaaaacggcgtgattcagggcttcgtggtgcaggacgcgtaccagattggttatcagggcataaaggcgctgaacgcggtgatttccggacagacggtggctaaggaaattgatattccagtgaaatatgtcaatgcgcagaatatcaacacccctgaaattgataaactgttacatccgtttggtaaaaaataaggaagtttatgatgagtgacggctatttcctcggggtcgatgtgggttcagccagcgttcgtgctgggctttactctgcgcaaggcgagcgtttgagcttcgcgacccgtccgatttcgcagtttcacgccagcaacgcgcgcgtggaacagtcctccgcggagatctggcagcaggtttgcgcggtggtgcgggaagccgtcgactcctctgggatctcacccgacgccattcgttcgattggcttcgacgccacgtgctcgctggtcgcgctggatgctgagggtaacggcctgagcgtgtcccccgacagtccggcatcgcaggacatcattatgtggatggatcatcgtgctcacgaagaaactgttcgcatcaatgccacacgcgatcctgccctgtgctacgtgggcggcgaggtgagtattgaaatggaactgccaaaactgctgtggttgcagcgacatcatcctgaaacatggaatcaggcctggcgctttttcgaccttgccgattttctggtctggaaagcgacgggccaggacgccgccagcctgtgcaccctcacctgcaaatggaactaccttgcgcatgaggcgcagttcagcgaatcgctgctcagggaggtggggctggagaccttactgacaaaaattcccgatactattctggacgtcgctgaatgcgtcgggaaactcagcccacaggcagcgcaagctctggggttgcccgaagaggtggttgtggcaagcggcatgatcgatgcccacgcgggtggcgtggcgctgacgggctcacacccggagggcacgctggcgctcatcagcggaacctcgaactgccatatgcttgccagtcagacggagatccatacgcccggcgtctgggggccttactggagcgccatgctgccgggctactggctgacggaaggcgggcaaagtgctgccggggcgctggtcgactggacgttgcgcgagcacggagccagcgcagacctgtttgcaaaagcagaagcggcgcaacgccatccggtggcgctgctcaacgactgggtagccgcgcttgaacaggaagaaaaatatcccacccgcaacctgcacattctggccgatcaccacggcaaccgctcgccgcgttcgcgtccggatgcgcggggcagcgtggtcggtctgacattagaaaccggtgaacgtgcgctggcgaggctctatctggccacgctacaggccatagcctatggcacacgacatattatggataccctgaaacatcacgggcacaccttgtcgcgcattgtcatttgtggaggagccacccataaccggctctggctgcgggagtatgccgatgccacgggctgcgatattcatctcttagccgaagaagatgccgtcactctcggcgcggccatttgcggcgctgtggcgagcggtgcatgggcaacgctcaccgatgccacccgggaaatggtcaaagccggcgacatcatcacccgtcggccggaaaccgcggctttccacaggcaaaaatatgaggcgtacctgatgctgtggacccagcagcaggcgcttaatctcctgatgcaacaggaaatgtaatggcaggatgcgtatgctttatcagcagttttttacgtacgttaaggattgaggcgtagcgatggccaaaacagttgaacagatagcgaaggatctgaatttatccgtcaccaccgtgcggctggtactgagcgggaaagccgaacagtatcggatcagcgtgaaaacacagtcccgaattaatgaacacgtcgagcgcttcggctataccctcaaccattcggcgcgcagtcttaagctaaacaaaaccgagacgctgggactcatcgtacccaacatctcgaacgtgttctttgcaacgctcgccgagaaactcgaactgcgctgccgccgttcgggctaccagctgatgatcagctgtacttacaacgatgtggattacgaaaacaagctggtcaaagccctgatggcgcgcaacgtggacggcttgtttatcgttccctcgacgctggaaaaccagcagcatcatttgcggcagatccaaaaaccactggtgctcctcgaccgggattttggctttactgacaacgcgctggttgagagtcataacgaggccgggggggatgaactggcccgcaacatgctggcagagagaaaaacgccgctctggttccttgtgggcgataccgcactgcccagtattacggaccgtctgaacggctacttacaggccctgaaaacagccggtattcaccatcgcgagtgggtcatcgaagggccggacaatacgccggagggcggatatgccctgatggattcgcttatcgacagccagggtgttccgcaggcgtttatcgcctcatcgttacccgttctggaaggggcaattgaagccctgcggacgcgtaccggcaccgtgccccaacacatcaatatcggcaccttcgatgagcaccccatgctggggttcctgcctaacagcgtctggtccatgcagcaggatgaagatacctgggcggaaaaagcgtttgaactgatgcagcgagccatcgacggcgaagcggtcaacgagacggcgaaagtcgatatgaagctggtcaaacgttcccgccagtaaaaataaaactgtacccggagaataaaaaatggaacgagcccgattagccagagacattatcgacacctgccttgagatgacccgcatggggttaaatcagggcaccgccggcaatatcagcgttcgctatcgcgacggcatgctgattacgccgaccggaattccctacgagcatctgaccgaagagagtatcgtctatgtagatgcacaggggcggcacgaagaagataaactgccctccagcgaatggcgttttcatcaggttgtgtatcagacccgcccggatgctaacgccgtcgtccataaccatgcggttaactgtaccgccgtctcgatactcaaccgccccattcctgctattcactatatgattgccgccgccgggggaaactccattccctgcgccccttacgcgaccttcgggacgcgcgcgctgtcagagcatgtcgcggtcgcattacgcgatcgcaaagcgacgctcttacagcaccacggcctgataacctgcgaagaaaatcttgaaaaggcactgtggctggcgcaggaggtagaggtgctggcaaaactctacctggccacgctggcgatagtagatcccgttcctgtactcagtgacgatgaaattgccattgttcttgagaaattcaaaagctacggattgcgcgtcgaggcgtaattttttatccgggggtgcttttatcacaccctcgtaatatctcttaaacaaacacctatttaccgcacttatcaccccgcctaaactatggcctgctttttggtagaggtggtaatgaacgattataaaatgacgccaggcgaactgcgtgcgacctggggtttagggactgttttctcgctgcggatgcttggcatgtttatggtcctgcccgttctgaccacatatggcatggcgttacagggtgccagcgaagcgctgattggtctggcgattggtatctacggcctggcgcaggcgatattccagatcccctttggcctgctctccgaccgcgtgggtcgcaaaccgctgattgtcggcgggctgctggtgtttgtacttggcagcatcatcgccgccctctcccactccatctggggaattattcttgggcgcgccctgcaaggttccggggcgattgccgccgccgtgatggcgctgctgtcagacttaacccgcgagcaaaaccgcaccaaagccatggcgtttatcggcgtcagcttcggcgtcacgtttgccattgccatggtgctggggcctgttatcactcatgcgctcggcctgcacgccctgttctggatgattgcggtgctggcgaccattgggatcgcactcacgctgtgggttgtgcctgacagtaaaaaccacgtcctcaaccgtgaatccgggatggtgaaaggctgcttcagcaaagtcatcgccgagccgcgcctgcttaagctgaacttcggcattatgtgcctgcacattctgctgatgtccaccttcgtcgccctgcccggtcaacttgccgcagccggtttcccggcggcagagcactggaaaatttatctggtcacaatgctgatctcgtttgtctccgttgtgcccttcattatttacgccgaagtgaagcgcaaaatgaaacgcgtcttcgtgggctgcgtggcgttattgctgattgccgagattgtgctgtggggcgctggcccgcatttctgggaactgatcgccggcgtacagctgttcttcctggcgtttaatctgatggaagccctgctgccgtcgcttatcagcaaagagtctccggcaggatacaaaggcaccgcgatgggcatttactccaccagccagtttctcggcgtggcgatcggcgggtcgctcggcggctgggtggacggtctgtttgactcccagaccgttttcctcgccggtgcgctgctggcgatgctctggctgtttgttgccagcaccatgaaagagccgcgctatgtaattagcctgcgggtagaaattcccgatgacgtggcaatcggtgacgcgttaaaacagcgtctggaagcgacagagggcgtgagcgaagtgctgattgttccggaagagcgcagtgcgtatgtcaaaattgacagcaaagtgactaaccgctttgaggtggagcaggcgctgaaggcctgaaaaaatgcccggtttagccgggcatgattgtcttaatcgcggaagtttttaaactggaatggctggccgagatcgccgccacgcaccagcgccatcacggattgcaggtcatcacgggattttccggtcacgcggatctcttcaccctggatctgcgcctgcactttgagcttactgtctttgataagcttaacgatttttttctgtaccgcgctctcaatcccctgcttcagcttcgcttccacaaaccaggttttgccgctgtgaacaaaatcttccggtacatcgagtgaggtcccttcaatgccgcgcttgagcagcttggcgcgcaggatatccagcaactggttgacctggaaatcagactcgctcaggactttgatcgtcttgttcgcgtcgttcagttcaatggtcgcctcaacgccacgaaaatcgaaacgtgactcaacctcacggacagcattttctacgccgttacgcgcttcctgcaaatcaacttcagaaacaatatcgaaagatggcatcttttcttctcccttcatttttgttgcgttgcataatacccgcaacgaggcataacgagaagcttagctgatggcgctatacttagcgtcatagcacctggcgccgttgcaggtgaggaggaacgatgaaagtaacagtgcttggatgcggagcccttggccaactctggcttacagcgctatgcaaacagggacacgacgttcagggctggctgcgaattccccagccctattgcagtgtgaacgtaattggtacagacggttcaattttcaacgagtctttgacggcaaacgatccggaatttcttgccaccagcgatttgctgctggtcacgctgaaggcctggcaggtctccgatgcggtgaaaagcctggccgcccagttacctgaaagcacgccaatcctgctgattcacaacggtatgggtaccattgaagagctaaaatctgtccggcaacccctgctgatggggacaaccacccacgcggcacgtcgcgacggtaacgtcattatccatgttgccagtggtatcacccatatcggtcctgcgcgtgaacagaccggcgattacagctatcttgcggataccctgcaaagcacgctgcctgacgtcgcctggcacaataacattcgcgcggaactgtggcgcaaactggcggtcaactgcgcgatcaatccgctgaccgccctgctggattgccctaacggtgagctgcgcaagcatcccgatcgggtagcgctgatttgccgggaagttgccgccgtcattgaacgcgaaggctaccacacctcagagtccgatttacgttattatgtcgaccaggtcattgagagtacggcagaaaatatctcctcaatgttgcaggatatccgggctatgcggcataccgaaattgattacattaccggttatctgttaaaacgcgcccgggcacacggtattaccgttgcggaaaacagccgtctgtttgagttagtaaaacgaaaggagagtgagtatgagcgcatcggcactggtatgcctcgcccctggtagcgaagagacagaagcggtcaccaccattgatttgatggtgcgtggtggtattaaggttactaccgccagcgtcgccagcgacggaagtctggcgattacctgctcgcgtggggtgaagatcctggcggatgcaccgcttgtacaggtggcggacggtgattacgacatgatcgttttgccgggtgggctgaagggtgcagagtgtttccgcgacagcccgctgctggttgaaaccgttcgtcagtttcatctttccgggcgtatcgtcgcggcaatctgtgcggccgcaggtacggtgctggttccgcacgacattttccccatcgggaatatgaccggctttcctggcctgaaggacacaattccggaagaccagtgggtggataaacgcgtggtctgggatccgcgcgttaacctgctcaccagccaggggccgggcaccgccattgattttggcctgaagattattgacctgctggtcgggcgcgaaaaagcgtacgaagtggcgtcatcgctggtgatggcggcggggatttataatttctacgaagcctgatgtcctcccgggctggcaacgcgctggcccgtctgccctacagaaatagtgcagccagcgtcacagttctgcgattcattttcctgccctgaagcgtctccccaccgttttaccctttcaaaaaccctttattttcagacaaataatcaaatctgcaccgcattgcatgcctgtttgacaggctaaaagaaccgtgaaaaactgcattcaactggtatataccagtttaaaaatccgccagcaaagcctgataacatcaacagcggcgggagagcagaaatctcttctggagtaagcaatgtgattacatttcttgagcacagagtcattcctgtactgattcgcgtaggcgaaaataaaatactggtcgccgtgcgcaacggtattgcgctgaccttacccttcaccatcaccggtagcctgtttctcattctcgccaatctaccgatacccggctggagtgaatggcttggcccgtttgccgaaaagctcagcgccccggtgggcgttacctttggtgcgatagggctgatttctgcggtgggtatcagctacaacctcgcgaaggagtacaacctcaacgctatcacctgctgcatagtcacgctggtggttttcttactggcgcaactcaacgacagctatcagctcaacgttgacaatcttggtgcggcggggctgttttctgccatcatcctggcgattttgacggtgcacatcgtgcgattttttatccggcacaacgtcgtgatcaccctgccggagggcgtgcctcctgccgtggcgcaatcttttgcgagcctgatccccgccgcggtagcaatcactctgatctggctgattagggtcatcctgaattttgatatcaaccacttcttcaccctgctgctcagcccgctcgtctccggcctcggttcgctgccgggcatgctggtgcttatttttctgatttcgctgctgtggtgctgcggcatacatggcgacaacgtgctttccggcatcaccagtcccattttcctgaaatacatcgctgaaaatactcaggcctatctgcatcatcagcccattccccatattaccgccgacgggttttatatcgtctttatgtgcctgggcggaacgggcgcgaccatggggctggtcattgccatgctgcgttcccgcagtcggctgtacaaatcagtgggtaagctctccctgccctccgcgatattttgtattaacgaacctgtcattttcggttgcccgatagtcttcaacccactgctgatgatcccgtttaccctgacgccgatgatcctgtgcatctcaacctggtcgctgatgtacttcgacatcattggtcgccccgtcttacagatcccctggaccatgccgccgattttcgccgcatggttcgtgaccggcggcaatatccctgccgtgatctggtccatctgcacgctggttatttccgccctggtctggctgccgtttttcaaactggccgagcgcaaacaacttgaaaccgaagcggccgaagaaaatgcccgccgcaacgcggacacgctttccgaccccatcttgtaaaaaggaaccacgatgaaaaagctcaaggttgtcactattggcggcggctccagctacacgccagaattgatcgacggttttatcaaacgctacgcagagctgccggtcaccgattattatttgctggatattgaagagggaaaagagaagctggagattgtcggaaagctggcccagcgcatggtagctgaagccgggctcccaatgaatatccacctgacgctcgatcgggaagaggcgctgaaagatgccgattttgtcaccacgcagctgcgtgtcggctttcttgatgcccgcatcaacgatgaaaaaatcccgctaaaatacggcgttctggggcaagagacgacaggtcccggcgggtttatgaaagctcaacgcacgatcccggtcctgctggatatctgtaaggacatggaaagatggtgcccgaacggctggctgattaacttcaccaacccggccgggattgtcaccgaggcaatcacccgccactcggccattcggaccataggcatttgcagtggcgcaaacagcatgatgatggacatcgccaaagcctacggcgtgcagaagtcggacgtttacgcacgcattattggtctgaaccatcttatttttgccgaccaaattttcctcaagggagaggattataccgacgactttattgaaaaactggccgagggcagcgcaaataactccctgaaaaatataccggacattgggtttagtgcccgctttgccagggcactccacatgtaccctatctcctacctcaaatactattttttgacccgcgagatgaccgacgccgcgctgcgcgatgcaaatactaagggaacccgcggcgagcagacgcgcgaaattgagcaacggctttttacgctttatcaggacccccatctcgcgcacaagccgaaagagctggagcagcgcggaggcgcctggtactccgatactgcatgctcgatcatcagcgctatttataacgataaaaaagagatccacgtcgtaaatgttcctaacaggggcacaacacccgatctgccggatcacgttacgctggaaaccaacgccatgatcgaccgaaacggcgcgcatcccctcgcctatggcaggctgcccgtgaagatccgcggcctgatccagagcgtgaaggcctatgaagagctcaccgttgaggcagctgtcactggaaattacgacacggcgctgctggcgctgagcgtaaatccccttgtgccttctgccgccgcggcagaacagatccttaatgaatatcttgaggtcaaccaccgttatttaccccagtatgctaaacgtaaggacgcacaatgaacgtagaacagacagacgattatgcggcgctgagtgacgtcgtggcgaaagcggtcattgaaaccgttacgcaaaaacccgatgcgctgatttgcatcgcgggtggagatacgccgctgggcgtttttgccgcgctggtgcacgccagcaaacagggtaaggtcgatttttcccgtgcggcatttgttggcctggatgagtggctggggctcggtcaggccgataaaggcagctgccgggagatggtatggggccatttcttcagccacctggccctgcgcgacgatcagatctgtttctttgatggcctgacgcaatcccccgaggaagagtgtcagcgtgtggataactttattgcggcccacggtgggcctgacatcattgtgttggggatcggtatgaacggccatatcggcttcaatgaaccgggcgccgccctcgataccggttgccacatcgtggacctggatgcggtgacgcaggccgtttcggttaaatacttcggccagcagcgtcatatccgtcagggcatttcgctggggatgaagactatcctggcctcacgggccattattttgatggcaagcggcgagaaaaaagccgacatcatcgcaacaaccgtcaattccgcaccggacccggcggttcccgcgacgctgctaaagccgcacccacggttaaggatcattgtcgataaagcggcagccgctaagctgtaaaagagaaacaggcgctgatgcgcctgttatcgtttgatgtgcatattcttgactcggaaaatatctgcccggttgtagctgatggagaagttaaatgctctaccgtcatcgaggcgcgtgacttcggtaattttcaacatcggctggcctggcagaatattgagatgggccgccagctcctcatcaaaaagatccgcttcaatcagtgaatcggcgtcgctgattttcttaccggtaaagtcttcaatatagccatacagcgatcccacttcgagaatagcctgcggaacagtggcaaccaccttgtgaggaatattgctgtcttcaattaacaccggctgtccgtccagtaaacggatacggcgaataaaccagacatcatcaccctgcgcaatttcgaggtgctgtgccagcgccgcgtcggcgtgaagggtcgtcaacgtcagcaagcggctggttacgttgacccgcccctgaaattcacgggaaaacccgagaatactgtcactcttttcattattcagaatgtaaatattgctggcagtattctttaaaacaaacatgcccttgccgtggatacgctcgatatacccttcctgtaccagcatcgccatggctttctgaaccgttacgcgcgtaacgtcataaatactggcaagatcgcgctccgacggaatgctttcgccctttttgtagacttcattgagaatatcttttttgattctctctttgatttcccagtacttatgttttttttccattgtcgattacccggccaaaaagagcatagaatcgcaggcccggtagcgctcgcgccaccgggcgagaaactacgggcgatacaccttcacgttcgcgaagccctgctcacgcagatacagcgcctgcaaacggctcatgaccccacgttcgcaccacagcagatacgttttgctctggtcgagatcgccaaactgggtgctcagcttgtagaacggcagcgaaaccacctcgacgccttccacctgcaacggcttgtcatcctgctcatcaacagaacggatatccagaatcgtatcgttagcaccgaagccgctgaccgtctccacctcaaccacttcctgctcggtctgctgggcgatctcacggatatcgatgttggacgcttccgccaccactttttccaggatgctgaaatcgaagttctcttcttccgcttcgatcttcgccttcaccgctttaatggttggactttttgagatcacaccgcaatattccggcatggtacgggcaaaatcttcagtaccgattttacgcgccagatcgatgatgtgctctttatcgtgagagatcagcggacgcaggatcagcgtatcagacacgttgtcgataagacgcaggttggtcagcgtctggctggagacctgccccagcgcttcaccggtgaccagcgcctgaacgccgtagcgttcagccactttagacgccgcacgtaccatcatgcgcttcagcaccacgcccatctgaccgtcgtccactttttcgaggatttcgccgaccaccggctcaaagttgatcgccacaaaacgcacgcggtgagagctgccgaagcggttccacaggtaatgcgccacctgacgtacgccgatttcatgcgccgcgccgcccaggttaaagaagcagtagtgcacgcggcagccacgacgcatcagcatatagctggacacgccggagtcgaacccgccggagatcagcgacagcacatcttcctgagtgccgatagggaaaccgccaataccttcataacgacccttgaccagcagcaggcgatcgttttcgatctcaaggttaacggtgacgtccgggttagtcaggcgcacgcgcgccgtttcaacgtgctggttcagaccaccaccgacgtagcgctcaacctcaatagagctaaactcatgcttaccccggcgcttcacgcgcacgcagaacgttttcccttcgatctggtcgcggtactgcaccagcgccttttcgaagatatcgtgcatatcggtgaagggaacgtcttccacttccagaatatggtgaatacccgggatacgggtcagcgcgtcgcgaatatcaagacgtttgttttcgtctttcgcgcggacttctacgtggtcccagtgacgcaccacggcgagcgtttcgtcgtagtgttttaatacgttacgaatgttcccggtgagaattttaataaagcgcaaacgcacggattggcttttgatggtgatttcagggaacaatttaatgataaacttcatggcggcaatgtttcttaggcaagcttataaaggcttgtagtggaaaatgatacagcagcccacacccgtggctgcatccaggcgcgcaagtataccaccatcgcgccactcgcgttatttgataattgccccgagtccgttaccatgtcagggcgaaaaatttaagagtcaattcactatgccgaagaaaaacgacgcaccggccagtttcgaaactgcgctgagtgaactggagcagatcgttatccgtcttgagagtggcgatctcccgctggaagacgcgctcaacgaatttgaacgcggcgtgcagctcgcgcgccaggggcaggtaaaactccagcaggccgagcagcgtgtgcagatcctgctttccgacagcgaagacgctaaaaccacgccattcacaccggacgccgagtaaatggatttttccaacgcgcttcaggcgcgcgtcatccgcgccaacgatgcgctgcgccgtttcattgagccgcagccttttcagaacactccactggttgaagccatgcattatggcgcactcttggggggtaaacgcctgcgtccgttcctggtgtatgccacgggcaacatgttcggtatcagcgataacacgctggacgccccggcagccgccgtggagtgtatccatgcctattcgctgatccacgatgatttaccggccatggacgatgacgatctgcgtcgcggtcagccaacctgccatatcaaatttggcgaagcgaatgccattctggcgggggatgcgctgcaaaccctggccttctccattctgagcgatgcgccgatggttgaggtgagcgatcgcgatcgtctggcaatggtgtccgaactggcaatggccagcggcgtcgccgggatgtgcggcggccaggcgctggatttagaggctgaaggtcgtcaggttactctggaacagctggagcgcatccaccgtcacaaaacgggcgcactgattcgtgcagccgttcgcctgggcgcgttgagcgcgggtgaacgcgggcgtaaagccctgccgattctggacagatacgcagaaagtatcggtctggcattccaggttcaggatgacattctggatgtggtgggcgatactgcaacattgggaaaacgtcagggtgcggatcagcagcttggcaaaagtacctaccccgccctgttgggccttgagcatgcccaacgtaaagcccgggatctgatagacgatgcccgccggtcgctgaatgagctggccgcgcaatcgctggatacctcggcactggaagcgctagcggactacataatccagcgtgataaataaactataaatctcgatgagcctttgatgagttttgatattgccaaatacccgacactggcgttagttgactccactcaggagttacgtctgttgccgaaagagagtctgccgaagctgtgtgacgagctgcgtcgctacctgctcgacagcgttagccgctccagcggccacttcgcctccggacttggcacggttgagctgaccgtggcgttgcattacgtctataacacgccgttcgatcagctgatctgggatgtaggccaccaggcctatccgcacaaaattctgaccggacgtcgcgataaaattggcaccattcgccagaaagggggcctgcacccgttcccgtggcgcggcgagagtgaatatgatgtgttaagcgtcggccactcttccacctccatttctgcgggcattggtattgccgttgccgccgaaaaagagaataaacaacgccgcaccgtctgcgtgattggcgacggggcgatcaccgccgggatggcctttgaggccatgaaccacgcgggcgatatcaaaccggacatgctggtgatcctcaacgataacgaaatgtcgatctccgagaacgtcggcgcgctgaataaccatctggcgcagctgctgtccggcaagctttactcctcactgcgtgaaggcggtaaaaaagtcttctccggcgtaccgccgattaaagagctgcttaagcgtaccgaagaacacatcaaaggcatggtcgtgccgggtacgctgttcgaagagctgggctttaactatattggcccggtggacggccacgatgtgctgggcctggtgacgacgcttaaaaacatgcgcgacctgaaaggcccgcagttcctgcatatcatgaccaaaaaagggcgtggttacgaaccggcggaaaaagatccgatcaccttccacgcggtgcctaagttcgaccataccagcggctgcctgccgaaaagcagcggcgggatgccgagctactcaaaaatctttggcgactggctgtgcgaaacggcggcgaaagacaacatgctgatggcggtgacgcctgccatgcgtgaaggctccggcatggtggagttttccaaaaaatacccggaccagtatttcgacgtggctatcgccgagcagcacgcggtaacctttgctgcgggcctggcgattggcggctacaagccggtggtagcgatctactctaccttcctgcaacgcgcctacgatcaggttatccatgacgttgccattcagaagctgccggtgctgtttgctatcgatcgcgcgggcattgtgggggctgacggccagacgcaccagggcgcgtttgatctctccttcctgcgctgcatccctgatatggtgatcatgacgccaagcgacgaaaacgagtgtcgtcagatgctgtataccggttaccactatcaggacggcccctgcgcggtacgttatccgcgcggtaatgcccttggcgttgaattacagccgctggaaaaactggatatcggtaaaggtctggtgaaacgccgcggtgaaaaagtggcgatcctgaactttggtacgttgatgccggaagcggcaaaagtcgctgaaaacctgaatgcgacgctggtcgatatgcgcttcgtgaagccgctcgatgaatctctgattctgagcatggcggaaagccatgacgtgctggtcacgctggaagagaacgccatcatgggtggcgcgggtagcggcgtgaacgaagtgctgatggcgaaccgtaaagccgttccggtgcttaatctcggcctccctgaccacttcatcccgcaaggcacccaggatgaggcgcgcgccgacattggtctggacgccgccggtatcgaagctaaaatccgcacctggctggcctgatccctccccttttctgctcctgctatgcttaaacgtattgtttaaacagcaggagcggaaccatgcaatacacgacattaggaaaaacggaccttaaggtgtcccggctttgcctgggatgcatgacgtttggcgagcctgaccggggaaatcatgcctggacgctgccggaagagagcagccgccccatcatcaagcgcgccattgacggcggcatcaacttcttcgataccgccaacagctactcagatggcagcagcgaagagattgtgggccgcgccctgcgagattttgcccgtcgtgatgacgttgtggtcgccactaaggtgtactacccgtcaggcgatctggcggaaggcctttctcgcgcgcagatcctgcgttccattgatgacagcctcagacgcctgaacatggattacgtcgacctgctgcaaatccaccgctgggattacaacaccccgatcgaagagacgcttgaagcgttaaacgacgttgtgaaagccggtaaagcgcgctacatcggcgcatcgtccatgcatgcctcacagtttgcccaggcgctcgatctccaggcgcagcacggctgggcgcgctttgtcaccatgcaggatcactacaacctgatttaccgggaggaagagcgcgagatgctgccgctctgctaccaggaaggcgtggcggtgatcccgtggagcccgctggcgcgcggaaggttaacccgtccgtggggggaaactaccgcccggctggtatcggatgaagtgggtaaaaacctgtatgacgatacagaagccagcgatgcgttaattgccgaacgcttagccgggatcgtcgacgatatcggtgcaacgcgcgcgcaggtggcgctggcgtggctgctgagcaagcgcggtgtcgccgcgccgattgtgggcacatcgcgggaagaacagctggatgagttgttaagtgcggtggacttatcgttgacgccggagcagattgcagagctggagacgccgtatcagcagcatccggtggtagggtttaaataaacacttgccgggtggcggcttcgccttacccggcctacaaataaagtgcgatcgtaggccgggtaaggcgaagccgccatccggcaaaacactcacccaaagtgatcgtaccctttccagtcaagcgtaaccggggcgccgtcgcggacaaacagtaacccttcactttccggcatcacctgcccgatgcaggtaaatttcgcgccgagatgcgctagcgccacatccagcgtcccgcgattcagctcaggcacggtgaagcacagctcataatcttctccaccggataacgcccagcgcagcgcctgttcaggttcgacatggcgaagcagttgctccgacagcgggaacagatccaggtcaacgcgtgcgcccacgccgctggccttcaggatatggccgagatcggagatcagcccgtcagacaaatcgatagccgaactggcccgctcgcgcagcgcctgaccgtgcagaatacgcggcgttggccgcagatggcgcttcaccagatacgccgcatcgtcagcctcttcaaccgttaaacggttctgaaggatcgccagccctgccgcgctgtcgcccggcgtaccggtcacgtagagccagtcgcctggttttgcacccgagcgcttcagcgcgcgcccggcaggcacatagccgtggattgccagggtcatggacagcggaccggcggtggtatcaccgccaatcagctgcatatcgtaataattcagctgttcaaacagggcatcgctgaaggcttcaagccaggcttcatccacctccggcagggtcagagccagcgtcagccaggccgggtcggcgcccattgccgccagatcgctgacgttcaccgccagcgctttatacgccagatcggcaggatcgatatccggcaggaaatgacgcccacacactaaggtgtcggtgctgattgccagcgtctgtttttcgggaatattgagaagtgcgcagtcatcgccaatgccggtttcaacatcaagacgagaggttctgacacggtcgaaataacgggcaatcagggagaattcgccgcatgccatacgttatgcctcagcaaattaaataaaaaaccggagccgcactgccaaaaaggcaatgcaagactccggtttgcggatcactttttgtggggacggatcgcaggtgcggctttatccagcacgccgttaacaaacttgtggctgtcttcagcgccgaaggttttcgccagttcgatcgcttcgttgatagccactttgtacggcacatcatcacgtttagacagctcaaacagcgcgatacgcaacactgctttttcgacctggcccagctcttcgagcagacgggacaggtatggcttcatcagaccatcgagatacgcgctattagtcgccactcccgacagcagttcacggaagtacagaacgtcaacgtctttcacgtcctgttctgacaggaactggtattcaacatcagcgatgtcgttctgggacaactgccaggagtaaagtgcctggacggcacattcacgggcgcggcgacgagcagcaggtttcacggaattccccttacaaaaaaatcaggccttgatggctttcaatacattgatcatttcaagcgcggtcagtgcagcttctgcacctttgttaccggctttagtgccagcacgttcgatggcttgttcaatactttcggtggtcagcacgccgaacgcgacagggatttcagcatcctgtgcaacgtgtgccagaccgttgcttgcaccgcccgcaacgtattcgaagtgcgcagtgccgccacgaataacggtacccagcgcaatcaccgcgtcgtatttaccggttttcgccagcgcgcccgctgccagtggcagttcgtaagcacctggtacccaaacgacggtaatgttgtcatctttaacctggccgatacgtttcagggcgtcaaccgcaccttccagcaggctatcgttgatgaagttgttgaaacgcgcaatggtgatggcgacgcgagcgtccggggtagctacagcagcttcaataatgttcatactcttcctttacgggttcatttggccccgcaggggggcggattttatcataatactttgcgcactgcttccctatttcaggagcaattacgctgtcgttaaatggaggcaaacatccgggcctaccggacgaatctcgctgaatgagagttgcggcgcatcggccagtttttcaaggccgggcagcacaaacaggccgcgcgcgtcattacctaacagtttaggcgcaacgtagacgagaaactcatccaccagccccgcctgaagcagtgcgccggcgagcatcggaccggcttcaacccaaatgctgttgacctgctgtttgccgagcaacatcatcagcaccacgagatcgagatgcccgttatgttccggcaccataatgctgcgcacgccttccggccactcgcgcgtatcttctttggtgcgggcaatccaggtttcacccggctgctgcacgatgcggtgctccggcgtcacgcggttctggctatcaacaataatgcgcagcggctgacgcaggttctcctgcggatagagcgcctgcgtatccgcattcagctcttcccagcgcacggtcatggccggatcgtcagccagtaccgtttcactgctggtgagaatagcatggctttgcgcgcgcagacgttgcacatcgcgccttgcctgcggcgaggtgatccactggctctcgccgttcgccatcgccgtgcggccatccagtgacgcgccaagcttaagctggataaacgggaagccggtgcgcatacgcttcaggaagcctttgttgatgttttcggcatcctgcatcatcaggccgtggctgacgtcgatgccttcctgttgcagacgatacagcccgcggcccaccacctgcggattaggatcctgcatggcggcgacaacgcgcgagacgcccgccgcaatcagcgcctcacagcacggcggcgtacgtccgtgatgactgcatggctccagcgtcacataggccgtcgcgccacgcgctttctcacccgccatgcgcagggcatgcacttcagcatgcggctcgcctgcgcggtagtgaaaaccttcccccacgatctcgccatctttaacaatgacgcacccgacattggggttagggtgagtggtaaaccgaccgcgctgcgccagcttcatggcgcgcgccatgtacatctcatcgtgcatgggcttaatcctgtaagcgggcgatctcttcgccaaactctttgatgtcttcgaagctgcggtaaacggaggcaaagcggatataggcgactttatcgagcttcttcagctgttccatcaccagattgccgatcattttgctcggcacttcgcgctcgcctaacccccgcagataagatttaatatggtttaacgccatttcgacgtcatcggagctgacgggccgtttttccagcgccttgagcatcccgctacgcagtttctcttcattgaacggttcgcgcacatcgttactttttaccacgcgcggcattaccagctctgccacctcaaaggtggtaaaacgctcgttgcacaccagacactgccgacgacgacgcacggaagacccttcgcctacaagacgcgagtcgatgactttggtatccacagcggagcaaaatgggcaatgcatacgatgtccctgttatctggttaactgatttctattttaccctgaactggcccgacaacaaaggaagagctttttgagacaaaggatctatgcctgacggcactatcctgtctaccattgcagcaatctgtgatttcaaggaattaaacgcaatgacaagacgttacctgaaaatagtgctggtggggagcctgttcacgctcagcgcctgcgcacagcaaagcgaagtccgcgagatgaaacaaagcgtgaatacgcttaacgtggcgatggacaaacttaacaaagaaaccgtgaagatcacccagcagaacgcgctgaatgccaaatccagcaatggcgtttatttattgccaggtgcaaacacgcccgcgcgtctgaacagccagattggcatgctaaagatgtctgtggtgaatgttgcagcgaatgccgatggtactcgcgcaacattacgcattcagggtgagtccaacgatccgcttcccgcgttcagcggcaccgtagagtggggccagattcagggcaccacggagagctatcaggaagtgaacgtgaagaatcagctcttcaccgcccccgccagcacgctggcgccgagcgatgttgatatcccgctccagctgagcggactgaccccagaacagctgggctttatccgtattcacgacattcaacccgccgcgcaataacccgcccttctagcggagtgaaatgtcactccgctaacatttacatttcgtatggattggcaacataaatgattgccgctacaatcccgcccgtctaaagtacgcaaacgtgaacgcaatcgattacgtatgtgagagatatgtgaaacaacacatatttttgtgagcaaggattcctataataggctccgcagaaacacgaaatatttagaaacgcaattcgcgcatttttcactcccggaagggaatttcaatcagtggcatgattatgaaaaaaacattactcgcagccggtgcagttctggcactgtcctcctctttcactgttaacgcagcggaaaacgacaaaccacaatacctctccgactggtggcaccagagcgttaacgtggtaggcagttaccacacccgtttcgggccgcagatccgtaacgatacttaccttgagtacgaagcgttcgctaaaaaagactggtttgatttctatggctacatggacgcaccggtattcttcggcggtaataccgacgcgaaaggtatctggaaccacggttccccactgttcatggagatcgaaccccgcttctccattgataaactgaccggtaccagtctggcgtttggtccgttcaaagagtggtatttcgcaaacaactacatctacgacatgggtcgcaacaagtccggtcgccagagcacctggtacatgggtctgggtacagacattgatactggcctgccgatgagcctgtccatgaacgtctacgcaaaataccagtggcagaactacggcgccgcgaacgagaacgagtgggacggctaccgtttcaaagtgaaatacttcgtgccaattacccaactgtggggcggcaacctgagctatatcggcttcaccaactttgactggggttcagacctgggcgataacgatttccgcgacctgaacggcagaaaagcgcgcactaacgactccatcgcgtccagccacatcctggcgctgaactacgatcactggcactactctgttgttgcgcgttactggcacaacggtggccagtggaacgacgacgccagcctgaactttggcaacggcgacttcagcgttcgctctaccggttggggtggttacctggtcgtgggttacaacttctaatcagtgcggattccgcccggtggcgctacgcttaccgggcctacgatccgaatgtaggccgggtaaggcgtagccgccccccggctttttactgcctcaccttgcgcaaaaaatctgccaatgacctgtccgcgctttcgctaaagcgtctttccgtcagcgtaatatgcaaacaccggtcgagacggaaacagcggtagtcatcgcgtcgctcacaccacgccgccagcagccagtgctctccccaaaagaacaaccccagcggctgaacctcacgccaggttaactgcccggcttcatcgcgatagtgcaaccccagcacacgcagggcagaaatggcctgatggatcacgtcgaaaccactacgggaatggggctgaagggcaatatccggcgcgtaaatccgcgtctgctccgccttgcgtcggctctcttctggcaggatcgccagcaccttctcctgagccgactccagctcgcgcgacagcgattccccgccccaggttttgagcaggcgaatcgccaccatcagcgcctcggactctttgttggtcagcatcagcgggggtaaatcaaaacccgacatcagccgatatccgcttcccgcctcgccttccaccggcacgccggaaagcgacaggtcgcggatatcgcggtacaccgtgcgctcggacacgccaagcctttccgccagatgcgctgccgttgtcagacgcctgccccgaaggatctgcacaatctggaacaaacggtcagcgcgtcgggtcatcggtttactctcataccggttgatggaggccgacgcgattaccttcgctgtcggtaaacagggctatagtgccaatgccttgcggcagttccagcgggccaaacacgcactcaccgcccgcagaagcaatacgatcgagcgtggccgccagattgtcagtatgcaggtaaataatagcgccctgcgaagacggtgtaacgccgtcaaatttcgccagcgcgccgccggtggccggatcctcgtgcgggaaaatcgccagatcagccacgtccatcttctcgcgccgcagcgcgacctgcatcaccagctcataaaatttgatggcgcgatccatatcggcgaccggaatttcaaaccagttaataacacttttcatacgtcctcctgcctgttgttagggttcagaaggagtctacgacagggctcctgacagcatactgtcaggagtgtttgtgagatgcagacaaaaaaaatcccggccagcaggccgggatttcgatactacctaagactcttacggcagaatggacggctgatccgccccttctttctcgactttctgctggatcagatgctcgcgcttcatgcccagcttcagcgccagtgcggacgcgacgtagatagacgaggccgtaccgatagacacaccgatcagcatggtcagcgagaagccttccagcaccgggccaccgaacaggaacagcatcaggatcaccatcagggtggtgccggaggtgatcaacgtacggtgcagcgtctgggtcaacgacacgttaaagatttcgtacggcgtgccgcgacggatcttacggaagttttcacgaatacggtcagataccacgatactgtcgttcagtgagtaaccgnnnnnnnnnnnnnnnnnnnnnnnnnnnnnnnnnnnnnnnnnnnnnnnnnnnnnnnnnnnnnnnnnnnnnnnnnnnnnnnnnnnnnnnnnnnnnnnnnnnnnnnnnnnnnnnnnnnnnnnnnnnnnnnnnnnnnnnnnnnnnnnnnnnnnnnnnnnnnnnnnnnnnnnnnnnnnnnnnnnnnnnnnnnnnnnnnnnnnnnnnnnnnnnnnnnnnnnnnnnnnnnnnnnnnnnnnnnnnnnnnnnnnnnnnnnnnnnnnnnnnnnnnnnnnnnnnnnnnnnnnnnnnnnnnnnnnnnnnnnnnnnnnnnnnnnnnnnnnnnnnnnnnnnnnnnnnnnnnnnnnnnnnnnnnnnnnnnnnnnnnnnnnnnnnnnnnnnnnnnnnnnnnnnnnnnnnnnnnnnnnnnnnnnnnnnnnnnnnnnnnnnnnnnnnnnnnnnacaagatcagcaacgaaaacctagaatgccgaaggcccagtagtcccagcgcataaagtcccagactttacggccgtggttcaattgttcaacagtatattcctgtgccacaacgcactcctcagatagacagctttttgacgcgcttgccgccgtacagcaggttcacgatggcacgggtgccgacaatagcggtaaacatcgacgttgcgacaccgataccggtagtaatcgcaaagcctttgatcgcgccagtacccactgcatacaggataagaaccttaatcagtgttgttacgttcgcatcgaagatggagctgaacgcccctttgtagccttcttcaatcgcctgctgtacagaacgaccgttgctcagctcttctttgatacgttcgtttatcagtacgttggcgtcgaccgccaccgcaagggttagaacgatacccgcaatccccggcatggtcagcgtcgcccccggcagcagggacatgataccgatgatcagcaccaggttggcaatcagcgcggaggtcgcaatcaggccgaacttcttatagaagaagatcatgaagatgatggacaccgccagaccggccagacacgcttccagaccctgtttgatgttctgcatacccagggttggaccgatggtacgttcttcaacaatctgaattggcgcaatcagcgcaccggcacgcagcagcagagagagctgacgcgcttcgttcgggttgctgataccggtaatacggaagctgttacccagacgagactggatgttggcgatgttaatcacctcttcctctttcaccagcacggcacggccattggcgtctttcttaccgctgtctttgtactccacgaacagggtcgccatcggcttgccgatgttatccttggtgaagttagacatgatgttgccgcctgcgctatccagcgagatgttaacctgcggctggttgtactcatcctggcttgaagtggagtcggtgatatggtcaccggtcaggatcacgcgtttgtacagcacaacgggctggccttcgcgggtctgtttcacttcagaatcgcccggcacacggcctgaagccgcagcagcctggtcgacattggagttaaccagacggaactccagggtcgccgtcgcgcccagaatctctttcgcacgggcggtatcctggatacccggcagttcgaccacgatacggtcagcaccctgacgctgtaccagtggctcagccacgcccagctggtttacacggttacgcagaatgttaatgttctgctgaacggcgtattcacgtgcttcactcagacgcgcgtcggtcattaccgcacgcagctggttgctgccctgagaggtgatcaccagatcgcggtgacgctgagacagatacgtcacagcctgatcgcgtgccgcgctgtcgcggaacgtgatgctcaggccgtagttatcttctttacgtacggtggtgtacggaatgcccttatcgcgcagatcgctgcgcaggctgtcgatattctgttcctgtagcttgccgagcgcggtatccatatccacttccatcaggaagtgaacgccgccacgcaggtcaagacccagtttcattggctctgcgttcagcgcagccagccagcgtggggttgcaggagcaaggttaagcgccacgacatatttatcacccagcacgcccatcagcgcttcacgtgcgcggagctgcgtgtcggtggtgtcgaagcgagcaagaattgcgccctcttccagtgccacagacttagcggtaattttttcttcttgtaacgttttctggacctggatcagcgtttgctcactggcggcgacaccgcgcgcgccagtgatttgaacggccggatcctcaccatacaggttgggaagcgcgtacagcaggccgacgataatcacgacgaccagcatgatgtacttccacaaaggataacggtttaacacggcagttccctttgggaaaagttgggattacagcgccttcatggtgcctttcggcagaacggcagctacgaagtcacgtttgataaccacttcagtggtgtcgttgagggcgatagcaatgtagccgttttccgctactttggttacgcgacccaccaggccaccattggtcaggacttcatcgcccttcgcgatggagttcatcaggtttttgtgctctttagtacgcttctgctgtggacgcaggatcatgaagtagaagatcagaccgaacacaaccagcatcagaatcagagacatcgggctgccctgcgctggtgcacccgttgctgctaccgcatcagaaataaaaaagctcattcaaattccctcattattaaaattaatcaacgttcaacggtggaacatcccgcccctgacgttggtagaaatcggtcacgaagctctctaatttaccctcttcgatagccttacgtaaaccagccattaagcgctgataataacgaagattatgaatggtattgagacgcgcccccaaaatctcgttgcaacgatcgagatgatgcagatacgcgcgagaataattgcgacaggtatagcaatcgcactcggaatcgagcgggctggtgtcactcttatgcttcgcgttacggattttcaccacgccatcggtaacgaacaaatgaccgttacgcgcgtttcgggttggcataacgcagtcgaacatatcaatgccgcgacgtacgccttccaccagatcttctggtttacccacacccatcaggtatcgtggtttatccgccgggatttgcgggcagacatgctccagaatgcggtgcatgtcttccttcggctcacccacagccaaaccgccgacagcgtagccatcaaagcctatctctaccagacctttaaccgagatatcgcgtaaatcttcgtaaacgctgccctggataatgccgaacagcgcatttttgttttgcagggcgtcaaaacggtcgcggctacgcttcgcccaacgcagggacatctccatggaacgcttggcgtagtcccagtccgccgggtatggcgtacattcgtcgaagatcattacgatatcggagccgagatcgtactgaatctccatggatttttccggatcgaggaagattggatcgccgttgatcgggttacggaagtgtacgccctgctcagtgatcttacggatatcgcccaggctgaagacctggaaaccgccggagtcggtgaggatcgggcctttccactgcatgaaatcgtgcaggtcgccgtggagcttcatgatctcctgacccggacgcagccacaggtggaaggtgttgccgaggataatctgtgcgccagtggcttcaacttcttccggcgtcattccttttacggtgccgtacgtgcccacaggcataaacgcgggggtttctaccacgccgcgatcaaacaccagacgaccgcgacgcgcgcggccatcggtggtatcgagttcaaatttcattttttctccgacgtcagaaaaacagtccaacgttgtaatacggtgccgcggacttattccccgacacgctcattcaaagcctgcggattgtacgtgataaacatcgcgtcaccgtagctaaaaaagcgatatttttgttctaccgcagacttgtaggcgttcatcgtatgctgataccccgcaaacgcggaaaccagcataatcaacgtcgattcaggcagatggaagttggtcaccagcgcatcaatgactttgtactgatagcccgggtagataaagatctgcgtatcgccaaagaacggctcaatcagctcgcttttcgcggcctgcgcagcgctctcaagggaacgtaccgacgttgtaccgacggccacgacgcgattaccgcgcgctttcgccgccagcaccgcatccacaacctcctgtggcacttcggcatactcagagtgcatgatgtggtcttcgatgctgtccacgcgcaccggctggaaggtacccgcgccgacgtgcagcgtcacgaaggccatctcaatgcccttggcgcgcagcttttccagcagcggttcatcaaagtgcaggcccgccgttggcgccgccaccgcgccaggcttctggctgtagacggtctgatacagctcgcggtcggcctcttcgtccgggcgctcaatatacggcggcagcggcatgtggccgatagcgttcaggatgtcgagcaccgtgcgctcgtcgttgaattcaacttcaaatagcgcgtcgtgacgcgcggtcatggtcgctttgatgctctcgtcatcccccagcagcagttcagcgcccggcttcggcgctttagaggcgcgaatatgtgccagaatacgtttatcatcgagcatacgttcgaccagcacctcaatcttaccgccgctggctttacggccaaacagacgcgccgggatcacgcgggtattgttaaagaccagcagatcgccagggttgagcttgtcgagcagatcggtgaaagtaccgtgcgtcagcgcgcccgttggcccgtccagtgacagcaagcgacagctgctacgctcaggcatggggtagtgagcaatcagggattcaggtagttcaaaggagaaatcggcgacgcgcatgacgtatactcgtgacttaaaaacaggcggcatagtctagtgctcacacccttttgctgcaacaactagccgccaccggacaacgaaaacgcatgaattttctcgctcatctgcatctcgctcatctcgcggacagctccctctccggcaatttgctggccgattttgtacgcggcaaccccgcggaagcgtactcccctgaggttgtcgacgggatttttatgcaccgccgcatcgacgtgctgaccgataacctgccggaagtgacggaagccaaagcctggttccgccccgaaacccgacgcgtggcgccgatcacgctcgacgtcatgtgggatcatttcctgtcgcgccactggtcccggctgtcgcctgatatgtcgctgcctgagtttgtgcgctacgcccacgcgcaggtgtcgatcattttgccggactccccgccgcgctttgtgaatctgaataactatctctggtctgaacgctggctggagcgataccgcgagatggatttcattcagaacgtcctgaacggcatggcgagccgtcgaccgcgtctggacgcgctgcgcgactcatggcatgacctggatgaacattatgatgcgctggaaacccgcttctggcagttctacccgcgtatgatgacgcaggcgaaaaataaagaactgtgaagtcggttcgattgataggtaaaagctggtggaacgattgttaccacctctttgtcttattcccgtactgcctctatactggcccgcgttgcgttccaaataaccttagtatctacaggagaatcatatggttctggtaactcgtccggctccggattttacagctgccgccgttctgggcaatggtgaaatcgttgaaaacttcaacttcaaacagcacaccaacggtaaagcgaccgttctgttcttctggccaatggacttcactttcgtttgcccgtctgagctgatcgcgttcgacaaacgttacgaagaattccagaagcgtggcgtggaagtggttggcgtctccttcgactctgaatttgtacacaacgcatggcgtaacacccctgtcgaaaacggcggcatcggtgcagtgaaatacgcgatggttgcggacatcaaacgcgaaatccagcaggcttacggtatcgaacatccggacgctggcgttgcactgcgtggttctttcctgatcgacgcgaacggcatcgttcgtcaccaggttgtgaacgatctgccgctgggtcgtaacatcgacgaaatgctgcgcatggttgacgcgctccagttccacgaagagcacggtgaagtgtgcccggctcagtgggaaaaaggtaaagaaggtatggcggcttccccagacggcgtagctaaatacctgtctgagaacgtatccagcctgtaatcggcacggtttaccaaaaaacccgcgaatacgcgggttttttatggcttatgctgcgccgtctttttttacctcgcgccagatgcgccatgccatacccgcaagcaccatcacccccgcaatcagtacgccccagaccatcagcgttttcattctgctttcctgctcagccgcagacgtcgcggttaaacgcgcctcgccacccagcgggacaggttccagcgtatccgccatcggcagggctgccagatcgtaggttttacgcagttcggtcgggatcagcatatccgtctccacgctcgccggtttcgcagccccgttcccccacgcgagcaggtacggccccttcccctgcgcgttaaacaccagatcgtagcgcacgcgttgcccggtcacgccaggcaggttctcaggcaaacgcgcattgagggtcttgatttttaccgtctcgaccagcccgccagggagcggaacaggttcagacgttttgccgccgagctggtagatcacctcttttttcagcgtatgccaccgatccttatccgcctcccgccaggctatttctgccgggagaacaccgtcgccattcagcatgaagccgatcgcactcagaggctgcggatgtttccagcgccacacggcttcgctttcggataaccgctccccctctcccgccaggctaatgtgctcagattccggctgttcagtcgcgttaatcgcgttgacgccggttaacgtcagggcagaacgccccgtgttcagcaccagcagcagataacgattcgcctcaggcgataacaccagatcggtatcgatgcggtcgagcttcaggcgatcctgtccactcatcacgtccagcaggggcatctcttcgcgcagggtataccagtttttcagatcctcgctgtaatagaccgatgccgtcccctgccacgagccctgcggcgtgtcccagaaaagctggagctgagagagcggaacctccgtcgcgttttccggcagggtcagcagatagtgctgtccggcagccgccgcgtgttgcccttccagcacaatttccacgccgtttctggcccgtagcataattttatcgccgctgtcctcttctccgcccggcgaggcgttaagcgcaaagaggcgcagcgccgtggtggtcggtgccggctgcggacgcgtcgtggtaaccaggctgaacggtaccggctcgcccgactgattaaacacgcgcacgtcgcgcagatcgggcgatgtgctctgctgataaaccgccagcggcagcatgacccgataccacggcgaagaggcagaggtatcaagggacaggccataggcataatcccgcggggattccgctggcgcgccctcgcagaatgccggaccggccacggccagcagtgccgcacaaacaaccgcgttcatccatttcatttttcttctcctgctttaggcggtagcggcgagaaatagcccacaatcaggaccaggatcgccacgccaataaacgcgacggcgcgcgccaggccgccaccgcccgcgctgtccaccagcatcagtttgagcatgaccacccccagtagcgccgcaccgccaagccactgctgacgggaggcgtgacgggtggcgcggatcatgaccaccagcgcgcacaacatccagaacagggcaaaggtggtctggataagccgcgaatgccacaacgactcccaattccaggccacctcgccgtaccacgccagcgcgcgcagcaatgcgccgttaagccaccagaaacccagggccatcagcacaacggcgggccacggacgggactgcgcaagcgatgccggatagtagcgatccacttcccgataaaacaccaccagccccagcagcgcgaacgccgccccttcctcaagcgggttcaccagcggcagccatgtctgttgatagaccacaccgtcctgcaaattggtcacgaccagcaataccaccagcgccacaaccacagggatcgcggcaaggcaggcgtagagcgcaggccatacccggaacggccacccgcgacgccgtacggccgcggagagcgccataatcaccccaccgccaatagccatcgcaatgccgcttccccaggccgccatgccccacggcagggagcgggcaaaccagtaaagctcggcggctatggcgagtaaaatcatccacaccagcgacagatgcagtcccattgagatgcgcggcagaagtttatcttcgtcacgccgcagcagcatcagggcggcaggcagcgcaatagcccaggccagatttgcccagccggccgccaggatttgctgttgccagatctgatacagcaccatcagcagcatcaccggccacagcagccatttgctggcatccagctcccgccatgccagacgagcggcagcctgccgccatccccaggccgacgccgccgtcagcgccatcacgcctgccagaaccgataactcctgcttcaggaacagctgcgacgcgcccagcagcgccactaaccagaacagcagcccaccggccagcaatgcccaactgcccggctgtgcgattttctgccacagccaggccgcagccagccagcaaagactgagcactgcgaaaataagcagcaggctcaacgaggtgacgccgtccatttgcgcccatatcgcgctgccgagcgccagcaccagcagcgccgtcccgctatagctcatgcgccgctgctgctgttgcacgcccagccagagaatacccaacccttccagcgcccaggccatcgccgtccagcgcgctgaaagcgccagcggtatggcaagcgtggcaaacccgccgccgatcgccagcgccgccataatcagtggccgcccgacagacggatagcgtcgcagtgcgagaaacgccagtgagagataaaacgccccatagcccagcgcgctgagcgccgggccgtacgtccagtgagacgtcatgccatactgcatcccaaaaccaatcagcggcggagcaaacagcagtgcgccgtcaataatctgtttgcctttttcctgcgcccgcagcgacagcgccacgctaaacacgccaaaaataagcgtattggcaatcaggaacagctgacaaataacatagtcttccggctggtagtcgctcagcccccataccccgccaacgccaaacgtgaagagcagcccgagcaggttgagctcgcgccagtgctgccagatgctgatggcgagaatgccgatggataacaggagatagaaggagaacagcgccacaaagctgccgcctccggtagacaacagcagcggcgcaaggtatccgccgaggctcgccagcatggcaaggctcagcgccttttgcagcacggccagcccgacgctcgccgcgcaaatcaccaccagcagcgcaaacgccagcgtcatcggcagcatttgccacagccggaatgcgccaaagacggttagataaagcacgccggtcgccccgccctggaggatcagcgcgtagatccgctgcctgtgccgcagccgccatccaacggccagcagaaccatggcaaacagcgccgtggcggcaagacgcagctcaagcggaaacagtgaatgttcaacggtatagcgcagcaggaaagagaggccgaggaagagcagtacaatccccagttttgccagcggattgccctgcataaaccagcgcgtcagcgaggacaggatgccgccaaaggcggaaggccgttttgccgccggtacaagcgctggttctgcttcagtgacgggcggttcgggacgccagggatcgacaggtgcggtaacggcttctgccaccgacgctggcgtctccaccggcgcggcggtctgcaccggctccggcgctttctcagtgacaccgcgctgctcaagcgcctcaatgcgctggcgaagccgggcgatctcctgccgcgccgccgtgcttcggttaaaacctatcaccgcgagcacgggtgccacgaccagcgcaaaaaccaggaacaaacagccaaggatgtaaagctcgtccatgtttccaccttcaccgtaaacgatccgctaagattgacacaaatcgttgcatttgcgccatcttaaaaggtgaaaaccattctgcctgcgcttagctgccgaaccagaccgcagcggagatcgcgggcagcgtgagcacgctctcctggaacgtcgctttaccctctttgatcttccacgttttaccggccagcagcggtgaatcttccagcactacttcacacgcttcgccccggttgatcgccaccagcacgcgctgctggttatagacgcggacaaacaccaccacgttatcgtgggcgtacatcacctgacagcccccgtagcgcagggcctgactctgcctgcgcagcgtcgccatacgctggtacaggctgagcagatcctgatcctgtttttcactctcccacgggaaggttttacggcagaaaggatcgttattcccctccagccccacttcatcgccatagtagatgcagggtacgcccggccaggtaaagagccaggtcaccgccagcggcagacgcgccacatctttacccagtaatgatttaaagcgcgcggtatcatggctgtcgagctggttaaacatccgcagctgctgctgatgcgacaggccagcgcgatagttttccatccacgccatgcaggtttcggcgtcgatatgctgcggatcgtaagagatatcggtgttagcgaggaaaccccacagcgggaaggtgaagccgcgatagttcatcgccgcgtcttctgcatcagcctgcaaccactggcgcgcgtcgccaaagtgctccccgaagacgaatgcttccgaccgggccgcttttgccgaccgggtaatggcggcgacatgctgaaggttattccgcgccccgcctgcttcacccagcatatgcaccacgtccagacgccagccgtccatgttccacggcgctttcagccagtggcgcacgatgctgtcgtcgccgccgtagatctcattcaccagcgatggcgactggaaatcgagcttcggcagactcggatagcccagccagtccagggcgcggccattctcgtcaaaactgtaccagtcacgctgcggtgagtccggattatggcatgcgccgcccatcgactgattgtgacggtcaaaccacgcgtgagaatcaccgctgtgattgaacacgccatcaaggatcaggcgcataccctctttttgcgtgttgtgccgcagccgcagcagcgcctcgtcaccgccaaactgctcgtcaacgtggcggtagtcctgtgtatcgtatttgtgcacgcttggcgctttaaacaccgggttcaggtacagcgccgtgacgccgagctttttcaggtacggcagtttttcgctgataccgtcgagatcgccgccgtaaaaggtcgatccccccgcctgggcggtcagcggctcgtcccattttttcagaatgatgtcgtgaccgaccgcatgatggtaataaaccttgtcctgaacggcgttgcgcttttcgctgcgcgcaaagcggtccgggaaaatctggtaaaagacctgatcgttaacccactgcgggccgttatccgggtgatccacggcaaactgctccagccgggccggaggaaaacggctgaagccctgcggggtaaaccacagctgccggttgttccacagcagcttgaagccgtagcggcgacgcggctgcccgctgcgcaaatcgatatttgcccgccacgccatgacgcccggctgcggctggctgcgcactttgtgcattttcagcgacgtttcttcgttatccacttcggcgcgcagggtcacacgttcaggctgattgtcccctgccagccagagcgtaatcacaaggttgtctttgttttgcttaacaaatggggcaaccggaaggtgccaggcgtttaacatcacgaatcccctttgatgaaattgacgtcaccttgccacagggtgattaaagatagctcatcgtgttcgggattattgggggaggagaacggaggaggagattttttccagggtaaaagggagtgtaggccgggtaagcgcagcgccacccggcatttttaccttactgtgcttccgccagctgacgatcgcggcgacatttaaacatccagcccaccagcagcaggacgatccacgcgaagcccacgtacagggaaatacgggtatccgggtgataaccaatcaggccaatgatgaagaccaggaagatgaggccgacaatggtcgttggcacgccgcccggcactttaaacttcagcgctttggcctcttctggcgacaggcggcgacggaacgcaatctgcgacagcaggatcatgatccacacccacaccgtcgcaaacgtcgccagtgacgcaatcaccaggaagacgttctccggcatgatgtaattcaggtaaaccgagaacagcagcgccacggtcatgaccagcaccgttacccacggggtgccgcgacgcgacgttttggcaaacaccttcggcgcactgccctgctccgccatgccgtgcagcatacgacccacgccgaacacgtcactgttgatggccgacagcgaggcggtcagtaccacaaagttgagaatgctggcggcaaacgcaatgcccatatgctggaaagtcaggacaaacgggctgccgttggtgcccacctggttccacgggtagatggacataatcacaaacaacgtgcccacgtagaacaccaggatacgcatcggcaccgagttgatggcgcgcggaatggacttctccggatctttcgcttccccggcggtgatgccgataatctcaataccgccataggcgaacatgaccatctggagcgacatgaccatcccgagccagccgttgctgaagaagccgccgttgctccacaggttatggatgccggttggctgcccaccgttgccgataccccagatgatgatgccgaaaccggcgaggatcatgatgataatggtcgcgaccttgaagaaggagaaccagaactccagctcgccaaacaccttcacgctcatcaggttgacggcgcagatgatcagcaccacgctcagtacccagatccagtgcggcacggcggggaaccagacccccatatagatgccaaacgccgtcacatcggcaatggcgacaatcaggatttcaaagcagtaggtccagccggtgataaacccggccagcgggcctaagttttcttgtgcgtagcgggagaaggaactggcagacgggttgtgaaccgacatctcccccagcgcacgcatgatgatataggccgccacgccgccgatgatgtacgccagcagtacgctgggaccggccattttgatggcatctgccgagccataaaaaagaccggtgccgatagccgagcccagcgccataaagcggatgtggcgggtgctcaatccacgtttaagtttgttagtgctttccattaaaatcttgccattcaacacgaaaaaaacaaaaaaccacggggccttnnnnnnnnnnnnnnnnnnnnnnnnnnnnnnnnnnnnnnnnnnnnnnnnnnnnnnnnnnnnnnnnnnnnnnnnnnnnnnnnnnnnnnnnnnnnnnnnnnnnnnnnnnnnnnnnnnnnnnnnnnnnnnnnnnnnnnnnnnnnnnnnnnnnnnnnnnnnnnnnnnnnnnnnnnnnnnnnnnnnnnnnnnnnnnnnnnnnnnnnnnnnnnnnnnnnnnnnnnnnnnnnnnnnnnnnnnnnnnnnnnnnnnnnnnnnnnnnnnnnnnnnnnnnnnnnnnnnnnnnnnnnnnnnnnnnnnnnnnnnnnnnnnnnnnnnnnnnnnnnnnnttaatgggcgttggatgtcacctgacgccctgccgcacggtcccagataatcgccagaaccagcgctacaacggaaggcatcagccaggccaggccctgctcggacagcggcagacgctgtgtccaggctggcaggatttctgcaaatgctgatgctttgatcccgtcaaggataccaaaaaatcaggctgataaacatggccggcgcaataattcgcgtcgagttatgccaccacgggcgggtgaagctcagcaccaccagcacgatacatggcggatagatcgccgtcagcaccggaattgacacctgaatcaggtggctcagaccgaggtttgacaccgccatggagaagatgccgaggataaacaccagcgtgcggtaagagagcggcagatactgggcgaagaactccgcgcaggcgcaggtcagacccaccgccgtcaccagacaggccaggaaaatcagcgccgccagcagcatgctgcctgcaccaccaaaggtatgctgcacgtaagcatgcaggatcgccgcgccgtttgcgctctgatcgaccagcgttgcgctatctgagcccagacggaacagcgccagatacagcagcgtcaggccgacaccggccatcaggccagcccagatggtgtagcgagtcagcagacgcgcttcggtcaccccgcgggaacgcgcggcgttaacgataacgataccaaacaccatcgcaccgagcgtatccattgtcagatagccgttcacgaaaccgtttgagaacgccgcgttctgataagcgtccatcgcggagctgatgggccccgcaggccagacgatggccgcaaccgccagcacgatcagcgccacaattttcagcggagccaggaagttacccacggtatccagcagtttgccgggatagagagaaaccagaatcacgatggcgaagtaaatgaggctgtaaataaacagcggcatcgagccgtcaccggtcagcggggcgatacccacttcaaaggagacggtcgccgtacgcggggtcgcgaacagcgggccaacggccagatagcagacggttgccagcagaacgccagccactttgccaatcggggtgctgaggctgtccacaccgccaccgactttcgccagcgcgataacggtcagtaccggcaggcccacggcagtaagcaggaagccaaacgcagccgtccagacgtgttcacccgcctgtaagccaaccattggaggaaaaatgatgttacctgcgccaacgaacagcgcaaatgtcataaagcccagcgcgataatgtcacgcgatttcaagtgatgggtcataaaaccttactgcctgtggatgtggtgttgaatacgttgagattttcgccatcccgcacgggacgatacagcggaaaatttgctcaatttcagcgggatatgctcccgtcctggcgtggcgaagaatagtttttcgatttaccacgcaaatacagtcggtctgacagtatatggggggcaatttaaacgcttataacgtttaaaggcaagaagggatcgtaaaaccagaacaatatgccagcatgaaaattcagaccaaaataatatgccatgtataagaaaaactcatggctaatcatgcgaacaaaaaagcaccagccgtataatattcatccgcgtttcgcttgactgcaaagcaaacgggccagcaatcgctggcccgtggaaaggtagcctgacacatctgccgtcaggcgctttttttggcaattaatcgttccggaatcacgaagctaaagcgcgtgcccttacccagggtgctttcgatattgagccggctttcgtggtggctgacggcatgcttcacaattgccagtcccagtccgctcccgccggtctgccgcgagcgcgccttatccacccggtagaatcgttcggtgagacgcgggaggtgctcgggcccaatccccggcccgttgtcctcgacgctaaactcagcgcccgccggggtatgctgccagcacaccgcgatatgcgtccctttcggggtatgattcacggcgttatagaccaggtttgagatagcgcttcgcagctcatcttcactgccgagcactttcagcgtgttatcaacgtcaaaactcagggtgtgctgattatgactcagcgtttgggcttcgcgctccaccacccgcaacatcatcggcacatcaatgatgtcgtttagcaccagcgacggggcagcctcaatctttgaaagcgtcagcagctgtttgaccagcccttccatgcggaacgtctgctcccgcatggtatgcagtgctttctcacgcggcgccccctcaagcgtttgctcctgcatcatctccaggtagccctgaagcaccgtcaacggcgtacgcagctcgtggctgacgttggcaaagaagttacgtctcgcgccctcaagctggtgcatctgggtaacgtcccgcgctaccatcagccactgccgatcgctgtagggcatcacgcggatttccagatggcgaccgttattgagcttcagattgtgcgggcgcgaaaaatcccgctttttcagatacagcgtgaactcgggataacgcagaaggttcaggatgttctgaccattatcatccggccagcgcaggcccagcagctgttgcgcgaggccattacaccagaagattgtcccttcttctgtcgtcaggatcaccgcgtccggcagcgactccgcaccgctacgaaagcgtttgatcaggcttcccagctcacgacggcgctttttgttacgcatctgcatctggtgcaggccgtagagtagcggttcccagctcccgcttcccggcgggggtgtcatacttctgtcgacccacagccaccaggagagacgcagtaaattccagaaatgccagacgagcaatcccgtcacggccaccagtaaaaaccacggcagatagccaaagatagcccccagaatgagggccggaatacaacataagatcagttcaaagacgagccttttccatgacagacgttccagcacgcgtcacactcctgtcattgttcagaaacgggtcgagaaacgataacccgtgccgcggaccgtctgtaccatgcgatcgtggccgctcagttccagtgctttacgcaggcggcgaatatggacgtcaaccgttcggtcttcgacatagacgttagttccccagacgttattcagcaactgttcgcggctgtaaacgcgctccgggtgggtcataaagaagtgcaggagtttaaattcggtcggtcccatatcgaggggattttcaccggtcatgacccggtgtgaggtaggatccaggctcagcccctgcatctcaatcacctcttccaccgccatcggtgaaatacggcgcatcacggctttgatacgcgccaccagctctttcggggagaacggtttagtgatgtaatcgtccgcgccggtttccagaccgcgcacgcgatcctcttcctcaccgcgcgccgtcagcattaccaccgggatatcgcgggtcatcgcctcgcgtttgatatgcttgataaactgcaatccggaaccgccaggcagcatccagtccagcaggatcagatcgggccagggttcattcagctggttcaccgcgctgtcataatcttccgcttcaaccggctggaagccattttgttcaagcacgaagcacaccatttcacggatcggagcttcatcttctacgaccagaatacgtctcgccatactttgccctgtcttatcgtatttaagttacaagtctgtaatgcggcgtcattatgcgtcagatttatgacagatttatgaaaaacattaccactataaatagcaaactgttgttttattacagcggttattttccgttccccgaacgtttataatcctgctttcttattattgccacggatcttttatgcgcatacttcacacctcagactggcacctgggtcaaaatttttacagcaaaagccgcgccgcggaacatgaagcgttcctgaactggctgctggagacggctcaggctcacgaggtggacgcaattattgtggcgggcgacatttttgataccggatcgccgccgagctatgcgcgtgagctgtacaaccgttttgtggtcaacctccagcaaaccggttgtcaccttgtgattgtcgccggaaaccatgactcggtggcgacgctgaatgaatcccgcgatattctggcgttcctcaataccaccgtggtggccagcgccggacacgcgccgcagatcctgaaaaaacgcgacggcacgccgggcgcagtgctgtgcccaattccgtttttacgcccgcgcgatatcgtgcaaagccaggcaggtctgtccggcatcgaaaaacagcagcatctgttgcaggccatcacccgctattatcaccagcaacatacggaagcctgcgccctgcgcggcgatcaggccattccgatcattgccaccggacacctcaccaccgtcggagccagtaagagtgatgcggtgcgcgagatctatatcggtaccctggacgcgtttccggcgcaaaacttcccccccgccgactacattgccctcgggcatattcaccgggcgcagatcatcggcggctgcgagcatatccgctactgcggctcgcccatttcgctcagttttgacgaaacgggcaaggccaaatccgtgcatctggtgagcttcaccggaggcaaactcagcgccgttgagacgcttgaggtgccggtcacccagccgctggcggtgctgaaaggcgatctggccgccattaccgctcagcttgagcagtggcgcggcgcagcgcttaatccccccgtctggctcgatatcgaaatcaccaccgacgactacctgtacgatatgcagcgtaaaatacagacgctgacggaagaccttcccgtggaggtgctgctggtacgccgcagccgcgagcagcgcgagaaaatactgctcaacgcccagcgtgaaacgcttagcgaacttcgggttgaagaggtgttcgcgcggcggcttgcgcatgaagaggtggacgaggccagacgcaccaggcttaacgagctgtttgcccagaccctgcattccctccatgacgaggacgaaaacgcatgaaaattctgagcctgcgcctgaaaaatctgaattcgctaaagggtgagtggaaaattgatttcaccgcggagccgttcgccagcaacgggctgtttgccatcaccggcgcaaccggcgcgggtaaaaccacgctgctggatgccatctgcctggcgctttaccacgaaacgccgcgtcttaataaggtctctcaggcgcaaaatgacctgatgacgcgcgatactgccgaatgcctggcggaagtagaatttgaggtcaaaggtgttgcttatcgcgctttctggagccagaaccgcgcccgcaaccagccggacgggaacttacaggcaccgcgcgttgagctggcccgctgcgaagacggcaaaattctggccgacaaagtcacggataagctggaacaaaccgccgcgcttaccgggctggactatggtcgctttacccgctcgatgttgctctctcaggggcagtttgccgccttcctgaatgctaaaccgagcgatcgcgcagagctgctggaggaactgaccggcacggaaatttacggccagatttccgccatggtttttgaaaaacacaaagcggcacgtaacgcgctggagatgtgcgaagcgcaggccgcaggggttgtgctgctgagcgaggaacagcagcagcacttgcagcaaagtttgcaggcacttactgacgaagaaaaagtcctgctggcacagcagcaaagccaacagaaagattttcagtggcttacgcgtaacgacgaactgatacgtgagcagcagcgtgcagccgcttcgcagcagcaggcgcaacaggctctgacggacgccgcgccccaactggcgaagctcaagctggcgcagcccgccgcccagctacgtccgctatgggagtatcagcaggagcagaccacccgcctggcgcagacaacagagcgaattgttgaagtaaatactcgcttactcgacagagcggtgcagcgctcgcgtattcgcaacggtgcactgcgcaaccgtgaacagttgcagacagagcacaaggtactgacgcagtggctgaccgaacacgatcgtttccgtcagtgggggcaggaaattgccggctggcgggcgcattttacgcaactgggtcgcgataaaaatcagcttgttgcccagtcagcgcgcatggctgagcttcgtcagaagctggctgagatgcctgaaagtacgttgacgctgacggctgaggatctggcgacggcaatggagcaacaggcacaatcgcgggcgctccgccagcgtctgacagcgcttcacgctcgctttcagccgctgcaaaaacggctgcgccagaatgcggaaagcgtgcagaaagcgcaggctgagcaggctaagctcaatgaaacgctgatcctccggcgtcagcagttcaaagagaaacatcagcactatgccgacctgaaagcgctctgtgagcgtgaggcgacaatcaaggatcttgagaactatcgtgcacagctcgaagcgggtaagccttgcccgctctgcggttcacgcgaacatccggcagttgtgcagtatcaggcgcttgaactgactgacaatcagcgccgccgcgacgcgctggagaaagaggttgctgcgctaaaagaggaaggattgctggtgctcgcgcaggtgaatgcgctgacccagcagatccagcgcgagacagaggaagcacaggctctctctgaggaagagcaagcactcactaaagagtggctggaggtctgcgcctccctgaacatagcgctgaatattcaggatgatattgccccctggatgagcgaacaggaacagtatgaacgccagctgtatcagctcagccagcgtctgacgctgcaaaaccagctcaatgaacaggaaggtcaggcgcgccagtaccagcagcagctgacggcgacgcgtcaggcgctggcggcctcgttacaatcgctgtcgcttagcgtgcccgatgaaggggctgaaagcgcctggctgagcgcgcgcgaaagcgaatataccctgtggcaggaaaaacaggcccagcacggtacgattcaggaaggtattaacgccctgatgcccattctggagacgctgccggttaccaatgatgcagaagccgacgcggttatccctgagaactggcgcggcatccacgacgaatgcgtgtcgctgcaaagtcagctcaccaccctacagcaacaggagacgcttgagcgtgaacggctccagcaatcacaggctcagttcaacgccgcgctgaccgcgagctgctttgccgatcgggacgcatttctctccgccctgctggatgaaacgtcgatccaccagcttgaacaacaaaagcagacgctggaaaaccagctccagcaggccacggcgctttcgatgcaggcaagccagcagcttcaggcgcatcaggcacagcgccccgaggggctggaaacagatgccgcaacgcttcaggcgcagttacaccagctggcgcaacagcttcgggacaacaccacgcatcagggggagatccgccagcagctcaaacaggacgccgataaccgtctgcaccagcaggcgcttatgcagcggattgaggaggcggcgcgtcaggccgacgactggggctatctcaatgcgctgataggctccagcaccggcgataaattccgtaaattcgcccaggggctgacgctggataatctggtgtggcttgccaaccagcagctcaaccgtctgcatggccgctatctgcttcagcgtaaagccagcgacgcgctggagctggaagtggtcgatacctggcaggccgatgcggtacgcgatacccgtaccctttccggcggggagagtttcctggtcagtctggcgctggctttagcgctttccgatctggtcagtcacaaaacgcgcattgactcgctgttcctggatgaaggattcggcacgctcgacagcgaaacgctggacaccgcgctggacgcgctcgacgcgctgaacgccaccgggaaaaccattggcgtgatcagccacgtagaggcaatgaaagagcgcattccggtgcagatcaaagtgaagaagatcaacgggctgggatatagcaggctggacagggagtttgcggtgcagtaaatggggggatgatgcgctctggtgccctcaccctggccctctcccacggggagagggcacaaacatcaaaaacggttttgcgtttattccggccagagccacgccgcgccgcgcactccgctggaatctccgtggacggctttgcggatcggcgtttcgcactcgccgccaaatacccactgtttcaccagcgttggcaccgtggcgtacagccggtcgacgttgctcatgcctccgcccagtacaatcacgtcgggatcaagaatattgatcacatgcgccagtgacttagccagccgcatttcgtagcggctgagcgccagttcagccaccggatcctgctcctcaaccagacgcataatctcgttacctttcagcggctgaccgctcagacgatgataatcggtggcaaaccccgtgccggaaataaaggtctcaatacagccctgcttgccacagtagcacggtacttcggcgcggtatttgagttcatcttcgtccatccacggcaacggattgtgtccccactcgcccgcggtgccgttgccgccaatatgcgagcgcccaccgaaggccacgcccgccccgcagccggtgccgataatgaccgcaaatacggtctgcgcgccagccgctgcgccatccacggcctcagagaccgcaaggcagttagcgtcattcgccagacgcacctcccggttcaggcgttggcttaagtctttatcaaacggctgaccgttgagccaggtggagttggcgtttttcaccacgccggtatacggcgaaatggagccagggatccccatcccgaccgtgcccgtctcgcccgttgcctgctctgccatatcgaccaggcgggcaatcgtctctatggtctggtgataatcatcgcgcggcgtaggcagacggtggcgaaacagttgctccccctgctcgctcagcgcaataacttctgttttggtgccgcccaaatcaatcccaatacgcacaagacactcctcattattttgattatcaacagagtagaatcccgcttcccgattagcaatgcaagcgatgcgacaattcgttatcatgcccgctgatttaacgacaaggccgtggaaattatcatgctgtggttcaaaaatttgatggtttaccgtctcagccgcgacgtttcgctgcgtgcagaagagatggaaaaacagttagccgcttactcctttaccccttgcggtagccaggatatggcaaaaaccggctgggttccgccaatgggttctcaaagcgatgcgctgacccacgccagcagcacggggcaaatcatcgtttgcgcccgtaaagaagagaagatcctgccgacgcccgtggttaagcaggcgctcgaagcgaaaatcttcaagctggaagctgaacagggccgtaagcttaaaaaaaccgaaaaagattcgctgaaggatgaagtgctgcactcgctgctgccgcgcgcttttagccgctttagccagaccatgatgtggatcgacactgttaacgggctgatcatggtggactgcgccagcgccaaaaaagcggaagatacgctggcgctgctgcgtaagagccttggctcattaccggtggtaccgctggcgctggaaacgccgattgagctgaccctgaccgagtgggtgcgcagcgggactgccgcgcagggcttccagatccttgatgaagcagagctgaaagcgctgctggaagatggcggcgtgatccgcgcgaagaaacaggatctggtgagcgacgaaatcgccgtgcacattgaagcgggcaaagtggtgaccaaactggcactcgactggcagcagcgcattcagtttgtgatgtgtgatgacggctccgtgaagcgccttaagttctgcgatgaactgcgcgatcagaacgaagatatcgaccgcgaagattatgctcagcgctttgacgcagactttatcctgatgaccggcgagctggcggcgctgattcagaacctggtggaaggtctcggcggcgaagcgcagcgctgacaggcaaaacgcaggccgggtaagcgaatgcgccacccggcatgcttttatttcagatagcggcacagataagaggttggctctgcaacctgtaaatggaactcgctgtggcccggcacgttgaagacctgcccggcactatagactttccactccgtttcacccggcagcaggacgttcagcgcgccgctgaccaccgtcatctcttccgcttctgcggtgccaaaggtgtattccccttccgccattacgccgacactggcgcggccagtgctgctgctggtaaaaccaatggatttcactttaccggaaaagtattcgttactttgaagcatgaactggcccttatatttattgagaaaaatccactataggggccatgctcatgacctgtcacgcaaaatcattacaccagtaattctgacgccaggcgcgccatcaggacgttagagagcagcaccggaacatccagcgccttttgcagtaaatcacgatgccgctgatggaagcccaggcagtcgagcatcaggacatccgcccctctgtcgatcaactcctgcccggccgcaatcagcttcgcttcgctgtcccagaacgggtttgccagcgcgtaaagcggggtgtgctccagcgcggcccacttcaccgtctggttatccagcagttcctcaacgggaacgatgaccccaacctgatgaccatcaacaattgaggccaccagcggggggataatccgcatcggttcgagcagaatggcattacgcgcgctgagccctttaacgggtgccgtgctcatcagcaaaataacgtcatagtcctgattgtcgagcacttcgatcacgccctgtagcgcgcgctcgattttctggcgtgacacatgcgccagtttaccgtcactgagtaacgttgccaggggatcttccccctctccgaccgcgtagtcttccatgacctcttcccgactcagcttccctaacagactaagatgcgtaatttgttgttcagagacatgctcggttaagagcggtaatacttcgcttacaggcaccacaccaatcgtgaggatcgccaacgtcgccttcattttgatcgccttccgttactaccacaactgccacacaggtacaggctcactacgctgcactgttcattttttcaacaaaacagcaccaagggtagcaggggatctctacaccgtaatgtaaagatcgactggcctttccgaatccacctgtaataactaaatattaactgctgcttaacatcagcgatatgttaaaagtgtgattcaggcacggttgtaacgaattcggattcctgtcaggacttctcaggatcctcatagcgccgtttcgcatccagcgcttcctgttcggtttcatgttcgctgatcagcgaatcaggtttagggtgatcggcacgcagctggtaccaggttacggtctgatcgccgttacctttttcaacggtaacgatgcgggcttcacgtggatagggaggtctggttggcatagctcatccttttttttatgtctgagctatgagtatagacggctgttagctggcgcaagccaaacgcagggcggtaataatctgaatcgcaacnnnnnnnnnnnnnnnnnnnnnnnnnnnnnnnnnnnnnnnnnnnnnnnnnnnnnnnnnnnnnnnnnnnnnnnnnnnnnnnnnnnnnnnnnnnnnnnnnnnnnnnnnnnnnnnnnnnnnnnnnnnnnnnnnnnnnnnnnnnnnnnnnnnnnnnnnnnnnnnnnnnnnnnnnnnnnnnnnnnnnnnnnnnnnnnnnnnnnnnnnnnnnnnnnnnnnnnnnnnnnnnnnnnnnnnnnnnnnnnnnnnnnnnnnnnnnnnnnnnnnnnnnnnnnnnnnnnnnnnnnnnnnnnnnnnnnnnnnnnnnnnnnnnnnnnnnnnnnnnnnnnnnnnnnnnnnnnnnnnnnnnnnnnnnnnnnnnnnnnnnnnnnnnnnnnnnnnnnnnnnnnnnnnnnnnnntgtgccgcctcgcggtacagtgcatcgcgttcggcgaggacgtcgctgacctcttcactcagcggtttcgcggtcagcgccgggcgctgtccctcttccggaaacgcctccagccgccccaccagcgtagagaccggggcacagaggtagatcacgacacccttttcgcgcataaactggcggttatacggtgccagaataatgcccccaccggtcgcgatcacggttgacggcgcggtcaccgcttccagcgtggctgtttcacgcgcacgaaagctctcccaaccctcatcctcaacgatatcggcaatggtcttaccggcattctcctggagccaatggtcagtatcgacaaactgactctggcacagacgcgccagctccagaccaacggtggttttcccacagccgcgagggccaactaaaaagatgggtgggttcataaccaggtgttccccttgctgccggataactgaaggctgtaaagaaatgattgcagtagatgttgcgctaactttactgcaaagcggtacggaatgacaagcctgtggaagccacactgtaccacaaaaccgcccggaggtgggctacgccgggcggcgcttcacttccagcagccatttatccagctcggcggcaaactgctggcgatcgcgctgcgacagggtgtccggcccaccggtttgcacgccgctggaacgaagcgtatccataaaatcacgcatggtgagcttctcgcggatcgttgccggcgaatagcgttctccgcgcgggttcagcgccgccgcccctttcgccagtacatcggcagccagcgggatatccgcggtgatcaccagatctcctgcgtcacacaggcgtactatctcgttatccgccacgtcaaacccggccggaacgcgcagagaacggatgtatctggagggcggcacgcggatattctggttcgccaccagcgtcagcggcatctgcacgcgctcggcagcgcgaaataaaatctctttgatgacattcggacacgcgtccgcatcaacccaaatcgccatagtctctccccattatgattctggtgactattgtcgcctgcatttcgttgttaagctatcaatgagagataacaacgcataataacggagagacgtgatggataagaaaatcgggtttatcggctgcggaaatatgggcaaagctatcctcggcggactgattgccagcgggcaggtgctgccggggcagatttgggtctataccccatccccggataaagtcgcggcgctgcgtgatgagtatggtgtcaacgctgccgaaagcgcacaggacgtggctcaggtggcggatattgtctttggcgccgttaagccgaatatcatgattaaagtcctgagcgagatcacctccagccttaacaaagagaccctggtggtatcgattgccgcaggcgtgaccctcgatcagctcgcccgcgcgctgggccacgaccgtaagattgttcgcgccatgccaaacaccccgtcgctggtgaatgccggtatgacatccgttaccccgaacgcgctggtcacatctgaagacgtggcggatgtactgaatattttccgctgcttcggcgaagcggaagtgattgccgaaccgatgatccacccggtagtcggcgtgagcggctctgccccggcgtatgtctttatgtttatcgaagccatggccgatgccgccgtactgggtggaatgccgcgcgcgcaggcctacaaatttgcagcgcaggcggtgatgggttcggccaaaatggtgctggaaacgggtaaacatccgggcgaactgaaagatatggtgtgctcaccggggggcacaaccattgaagccgtgcgcgtgctggaagatcgcgggttccgctccgccgtgatcgaggcgatggaaaaatgcatggaaaaatcagagaagctcagtaagtcctgatgcgttacgccgggcgtcaggcggccacttcggtgcggccccgtccggcatttttggctttatagagggccacgtccgccgcctttagccattcacgatagtgggtgaactgcgccccccagggggcaaccccaacgctgatacacaacctcgccataggtgctccgtgcagcggcatgttgaccagccgttcgtggacgcgcgacatcgctgcaatcgcgctgtcggcaggcgtgccggacatgatcaccgcgaactcatccccgccaaaacggccaatataatcgcctgagcgcagggtcagctgaagctggcgcgtgatggcgacaatcgcttcatcccccacgtcatgcccccaggtgtcgttgatcgtcttgaagtgatcgatatcgatgagcagtatcgtcgcctgtcgatggctgcgacggcaggcctcaaattcgttacgcagcagcgtttcccagtgacggcgattgaatacgccggtcattccgtcgcgggtactcatcagctcaagccgacgcttatgctctgccagacggatcgccgtgcggtggctgagccaggcaaacagtatgggatagaccaccagcacggggagcgtcagccacaacgccagcggttcagaggtcaataccacaggagtacccatggattgcacggtcaacagggcagacagggcaagtagcgcgagtcctgtcagaaataaccgacatccccccgatcccatcatattcatgccaatcatcacgatcagcgccgccgttggtagcgcattgaaccctgttagccccatccagacaccggcaataatggcatcgattttcagattaacaatttcactgctgtggggttcagccgaacgaaaagccagctgccaggccagatggggccagacaaagacccagcccaccagcaataaccaccagacgccggaaagaaactggctcaccagaacgctggcaagcggaacaaatagcgccgccagaccaacgatgcgtgccagccgtattcgccgggcaaatcgcagaccggaacggtatgaatcatcctgagaaagctgctggtgccacgcttcccgaatgttctcgtgattgtcataaaactcatcattcatcatttttgggaatattctgaaacattttcccaaattatagagaggggggtagcggggaaagtatgaaattttgggtgagccacagccgtgactcacccgttagcactacgcctgttttttgaggcacgcgctcataaacttgctgcgatcgtcgcctttcagcatctgctgtgtcgcctgggcgttgcactcacgcattttttgctgctgtggggtcaggcttttttcaccgggtttagccgcaccatttttaaggcagtcgctcatgtacgttttacgggcatcccctttcaggctttgcgatgtcgcctgttggttacaggtcgtcatgcgctgctgctggggcgttaacgttttctcttccgcgtgtgctgaggcgatcagacacaggccagagagcagggtaaccagtattgttgttttcattgcaccatcctttatgtgaagttccacgttaagtctggctcgttacgggaaaaaaaccaccctgcgactctgattttcgccgggctctgcggttatttcagccctgtatcggaacaatattcattaaccggtttcgccgggtgggaggcggtaattaataacagaaattatgcggtgaaaggtgtgctctgtctcaatttaattttccctgcataaatgtgtaaaaataaaaacagagcgacgccaggcatcctgcatgacaattctgtgacacgtcatttcacctcaggcaggttagctgcgaggatgccttaaaagcttctttacgtattgctgaagcagctccgcatcttccgcaggcacctgggaatcaggacgcgctttttccagcgcaccttcaacgttgtcgatcaacgcctcctgctccggttttgccatctgtcgcagcagcgccgtcacaacgatttccagcgcctcgacctgggcaaccagctctttcgactcttcttccttttgggcaagcttaaccaacaactcagcaatgagatttttcatggtgctatttccttatgtgatttcccctgaaattaacaccctctctgaataatgaaaagcatggattagctttatcttatgcaaaagtgacatcgctgccaaaaaagatatttcagcgcgaaagcgaaacgttttcctgaaagaaaggcgccgcatttcgttatataaaaatgcggcgttcataagaataaataatatattatcgtgtttaccgggccgactttgcctcagcgattcgcctgcggcgtcgcaaggcaaaggccagttgaataatattcagcaggaccaccaccgccgtcgcggcaaatacccagcggaaacccgccatcgccgagaccgaggcgccgataagcgggcctgctacgttgcctaaatacatgaacgactggttgtagccaaaaatgcggccggttacctggtcactggaatatttcaccagcagcgtctgaacagcgggcagcatggcgccatccgcgaagccaagcaggaagcgcaggatgccgagctgaagaggtgtggtgacgaatgacatggcaaagaaaaggatcaccgcaatgatgagcgttgccatcagaatacgtgccgtaccgatcctgtcgcccagtttccccagacgcggagcagacatcagcgccgacacgcccggcaccgcggcaatcatcccgctcagaaaagcaatgttgctgctgtccggcgccatcgacttgataaacagcgccagaatcggccctaccgaaccgttacagagctggatcaccatcgtcgtcacaaagaggctaatcatcaggccaggataaggcagcgaggcgaaaaccgcttttccgctcaggcgttcggatttactgacaacaggccgcccgccctctttaatcagaaaaagggtgaccagaaagctgattgtcagcaggatcgcggtaatgataaagaccgcacgcagcccgacatggtccgccaggaagccaccgagcagcgggccgccaatgaccccgctgatctgggccgtggaaagcgtgctgagcgcccagccgcttcgctcacgcggtacctgtgaggccaccagcgccatggcattcggaatgtaaccggaggtcagccccattatcgcccgcagaataaacagctgccagacgttggtggcgaaggcctggagcaaaatggctatcgccatccccagcgaggcgcggagcagcatcaacttgcgccccttgcgatccgccaggctgccccacatcggcgacacaatggcggagaccagaaacgtcacgctgaacgtcaggccggaccacatcgagagcgcttcatgggaagtcactcccagctgcgacacatacagcggcaggaagggcaatatctggctgatagccagtccggtgaagaagcagccgaaccagactgaaatgagattaactttccaggattccataacagaaatagtcttcatttttaggcgaattcgccgacagattagcaagttacgcgcaatgacatagcgccagagatgcggccttgcagactttggtgttttatcttcccagtcatcatatttgtgaaataagtcacaatttatccaatttttggcggaagattatgcttcatcgacataatccatagccgcgcatccccagatggaaatggttggcatgggcggcattatagtccggccccagaccgttaccgtaatagccacagcttgccgagagcagggcctgtagccagggctgcgtcttttccgctttccagccgttcaggacggtaacgcgctgtccatttgccagcctgaaagcgctgatatccagcgcatccgccgtggcatgttcgctgcgccgcgcatccgggcggctgtagatattgcggcaggcgaagctgcccagatgttcaatacgcgtaagctcgcttccggtccaggttttggtgagcggtcgggcctgctggctgacaaacagcgccgaacttaacgccagcggacaactggccagaaagctgctgttcaggctcaccgggccaaaatcgcgcacgcgcaccacgttactcagcggacactcaccggcgctgtcagcgacagcctgggtacggataagctggcgttgattcgcctgcgctaacaggctttcgcatgcctgcggtgttaaacgtcgaagtttaaactgggttatttttccgggcggatcgtcaagcgtaagcggcacgaaaggattgtaatacggcggcaaccagcggtagcccaccgtggcgatcccggcaataacaataagaataagcagaccttttcctttcacgcgccccccttcagcatccccaaaacattatggcagaaggccgcgaaacccgccgggcatcgtggtatgttatgggcttttcgtcagactggaagagagtgagatggcaaagcagcgcgtaggtattgtctttgggggaaaatcggcagagcacgaggtgtcattgcaatcggctaaaaatatcgttgatgcgattgataaaagccgttttgacgtggtgctgctgggcattgataaacagggccagtggcatgttaacgatgccagccagtatctgttacacgctgacgatccggcgcacattgcccttaatccttctgatgtcagcgtcgcaacggttccaggcgtggaacagggacagcttatcgatgccgggaacgcgcaggcgctggcacagattgacgtagtattccctatcgttcacggcacgctgggcgaagacggctccctgcaaggcatgttgcggatggcgaacctgccgtttgtcggttccgatgtgctgggctctgccgcctgcatggataaagacgtcacaaaacgtctcctgcgcgacgccggtctgaatattgcgccgttcgtgacgcttactcgcgccaaccgcgataaacacagcttcgcgcagatccaggcgcaactcggcctgccgttgtttgtgaaaccagcgaatcagggctcgtccgtcggcgtcagcaaagtcaccagcgaagcgcagtttaacgatgccgttcgtctggcctttgagtttgaccataaggtggtggttgagcagggaattaacggacgcgaaattgagtgcgccgtactgggcaacgacttcccgcaggcgagtacctgtggtgaagtggtactgaacagtgacttctattcctacgacaccaaatatattgacgataaaggtgcccaggttgtggttcccgccgagctcgatcccgacgttaacgacaagatccgggcgatcgccgttgaagcctatcaggcgctgggatgcagtgggatggcgcgcgtcgacgtgtttctgacgccggataacgaggtggtgattaacgaaatcaacactctgccgggctttaccaatatcagcatgtacccgaagctgtggcaggccagcaggataagctatccggaactgnnnnnnnnnnnnnnnnnnnnnnnnnnnnnnnnnnnnnnnnnnnnnnnnnnnnnnnnnnnnnnnnnnnnnnnnnnnnnnnnnnnnnnnnnnnnnnnnnnnnnnnnnnnnnnnnnnnnnnnnnnnnnnnnnnnnnnnnnnnnnnnnnnnnnnnnnnnnnnnnnnnnnnnnnnnnnnnnnnnnnnnnnnnnnnnnnnnnnnnnnnnnnnnnnnnnnnnnnnnnnnnnnnnnnnnnnnnnnnnnnnnnnnnnnnnnnnnnnnnnnnnnnnnnnnnnnnnnnnnnnnnnnnnnnnnnnnnnnnnnnnnnnnnnnnnnnnnnnnnnnnnnnnnnnnnnnnnnnnnnnnnnnnnnnnnnnnnnnnnnnnnnnnnnnnngattgaactggcgctggagcgtcacgccgctgacagcgccctgaaaagctccgttaactaacggttagtcggctttctctgccgtcgtcgtctcatcgggacgacggcggataatgaatcccgccagccagaaactgattacccaggtcaccagcccaaccgcataggtttgccagcctttcgcttcaaatcccagcagcccgacaacaccgttgagaataaagatcagcccgatcgcaaaggcgtagtaatgccagtcacggcgtaatttggaagtgagcttcatgacaactccggcagaaaaaaaactatcctctcacagtttgataaaggcgtctgtggcggatacgtaaattctgaaatgcggcgcagtttcacttatgttatcaatttgtgacgtgatgcagaaatcgacaatccaggagaaatcctgagccgaatttcccacgattctgatattgacaaatgctatgacctgtcacactcaccctgtacgacgtgtattaaaacagagtgatattttcgggaggtcttatggcagactttacattgtcgaaaccgatttttggcggaaaacaaccaaaaacctccacggcggggaatattgcctatgccctgtttgttctgttttgtttctgggcaggaacccaactgctgaatatgctggtgcatgcccctggcgtgtatgagcatctgatgcaggtgcaggatacaggccgcccgcgcgttgaaatcggtttaggcgtgagcaccgtatttggactcattcccttcctcgcgggcagcatggttctgggcgtgattgcccttgtcctgcgctggcgcaaccgccactgattacagtcccatacagcgtgcccgacgatcgtcaacgcgtttcgcgaaccaggcggtcgtcaggttacgcgtgatcttcgggctttccagctgaatgcctggcagaatggctctgggtaatgcctttccacttttcttctcggccagcgcaaagacctgcttatacagatccgttttctcaaacgccaggctgtcgcccttctccagctgtcggcgaatgtcgctgttgctcatctccagcttcgtcgagagttttcgcaccgcacgttcggtggtcccggcctcactgctgccgtaagcaatgagatcgccgtccaaagcgagcttcacatcgctggcgcggcttaccgcattctggaaggctgcatttcggctggcataccagcccgcgttaaagtcggcaaagcgatacagcggtttatcgtagttggccggataattcagcaggtgatacgtcccaaaccacagcccaccgcgcagggagaagacctcctgacgtaccgtaccgtcgatatcccacggatagccgtcggtatgcttttccgcaaatgcgatactgacctgcatcggaccgccggtatgcaccggatttagcgagccaaacagcttctgccccatcggcaccatattgatgaaatcatcgaaaatggcgctaagctgtttctcggttttcaccgtatccagccgttcactgtagcttttaccgtttggcgaggtgattttaagggcggtatgcaccaggaaaaccgggatatgcatcgattcggcccggcggtcgatctccttccaggcgattttgttcaggccaggcactacaggatctgactgatacatcgattcctgctgcgccaccgcgagcaccgagcagatattctcctcggtaggcgcgatcttctgacttttgaaggtcgcggccagcgcatcagcccactcactgcgatccttcacgctggcgggcattttttgccgcaccacgctcgccacatcaacgggcttctccccttctttgagcggggcagcccctttttcggcacagcccgccagcacgaaagcggcgagtaacgtcagcggtaatgcacgtggtacggcaaatggcatagcaattcctttttaacctaatgtatgggtgacttcctgcacgtccttatcgtccagctcacgctcgaaactgcgtaaacgtttgtagatggacatcagctccaccagcgtagtccaggagctgatcagatactggaacgaaccgcgaacctgaccaaagacgttggtgatttgggtcatcagaccgagcgtaatcgtacccgcaacgatggacgggaacagcaggaacaacccgaaaacgttatcaacctgaagataaagaatgcgcgcgatattgaaatacatgtaatggaaatagaggcggaaatagttacgacgtacggcgccaaacagctcacgcacggtaggcggtgacgcacggttggcatcgtcttcgccatacaccagttctttacggtaggccgcttccacgcgctggtttttaaactccagccccggcagcttgatccccaccaccgccagcagccccgttcccatcagcgaccagacaatcgcagcaatcaccaggccgtatggcagatggccgacaatcggcagctccggaacgtgcgacgagagcgtcaccagcaccggcaggaaggcgatcagcgtcatgatggcgttgataaagctcacgcccatatcttccagagtagaggcaaaacgcatggtgtcttcctgcacacgctgtgcggcaccttcgatatgccgcaggtgctgccagtgcgccatatagtgttcgttcatcgcggtacgccagcggaacacatagtggctgacgaaaaagttattcatcacgccaatcaccacggcgataagggcgatgccgaggaagatccccacctcatggtagaactggttaatggtcactttatgcggcgaactcagcgccgtctggatcagatcgtaaaacggcgcataccaggcgttgaccgctacgcccacctccaccaggaaccaggtgacaaagatgattaacgacgtgccgagaatcgaccagtattgccagcggtgaggagaatagacgaaccagaacatggcaaaaagccctacgcagagcacgtaataagcgtagaaaagcagatagctcatggaccagaagcgcgctgcgctaatgggaatgtcgcccgttgcccccgtaagacgggtcagccacgcgccgccaccggcctgccagaaaatgacagccagcagtgcccaaataaatgccgacaggaaaaagggccccggctttgggaaaaaagatttaaacattgtgcttccttcttgttgttatggctgttgctgtattcaacatatcgccacacgaaaccttgcctgtgccagcctcccggctcaggcaaaaaagtgagacctgcgggtgaattattagttcgcttcacagttttcaggaattgtttcggtgcgtttcattcgcaacagcgatcgtagcgtctatcatacggtcgatgtcacaaaatgggagccacgccgcaagtaaattgttcaaatttacccacggttacgtttttctcgctatcgttatgcaaatcgggccattgcccgacgccgattagtagtataactacccgtaactttccttattcacttgatggatgcttttcgttgaaacgttgtctgctctctatcgccgcgctgtgtgcggtgagcctgtccaccgcccaggcagcacagcctctgacggccccggttctggcctctgacattgccgatcgctacgcgaaccttatttattacggcagcggtgcgacgggaatggcgctggtcgtgatcgacggtaaccagcgggtgtttcgcagcttcggtgaaacacgaccgggaaataacgttcgtccgcagctggattccgttatccgtgtcgcatcgataaccaagctgatgaccagcgaaatgctggtcaaactgctcgatcagggcgtggtgaaactcgacgatccgctcagcaaatatgcaccgcccggcgctcgcgttccgacatatcagggaacgccgatcagactggtgaatctggcgacccataccagcgccctgccgcgagaacagcccggtggcgctgcgcatcgccctgtctttgtctggccaacccgcgagcaacgctggaactacctgagcacagcaaccctgaaatcggccccgggctcgcaggccggctattctaacctggcgtttgatctgctggccgacgctttagcgacggcgtcgggtaaaccttaccctcaactgtttgaagagcagatcacgcgtccgctcgggatgaaagataccacgtacaccccttccccggaccagtgcaagcgtctgatggtggcggaaaaaggggccagcccgtgcaataacacgctggccgccattggcagcggtggcgtttactctacgcctggcgacatgatgcgctggatgcagcagttcctctcatcggatttttacgcgcgcagcaatcaggccgaccgaatgcagacgctcatctaccagcgtgctcagctacgacgcgtcattggcatggatgttccaggtaaagccgatgccctcggcatgggctgggtgtatatggcgccaaaagatggccgacttgggattattcaaaaaaccggtggaggtggcggattcatcacctacatggcgatgattccgcaatcaaacgtaggcgcttttgtggtggtcacccggtcgccaaatacacgcttcgtgaatatgagtgatggcgtaaataatctggtggccgagctgagcgccaataaagcgcaggtgcttacggcctctaactgatctcaatagtccgtgggcaaacggttgatactgatcagtttgccccggctcatattgatgtagttcccctgtcgcagcgccgccagaacctcagcaacgaccgaacgagaaatacgagtgctacgctgaatatgattcataacaccaatttttgaacgtagcgtgtcatcccactcggccatattgatcagcatcgcccggatttggctataggaattatttccgaccaattgcatgtcacgttttcccaataaatggttaagccatgacagccagcagaaagcctcttgccaaagttgcgcgtcctgaataagctggtacgcgtcagatgccggtaaataaaatccggtacaaggcgtctgtgccatcaaagaatattcaagatagttttcatttatccatgcgcttaaaccgtggatatacggtgcccgcgcaatacccataagtaattcgtctgatttacggtggacggccgtcaggccggattgtatgacaacggtcaatggttcatcatcattattgccggtagttattaattgttgtggttcgatcttaaatggggtaccggcgacttccagacactttatgagccggcttaattcagaaagtggcttcgcattaacgttcatgcatacctcaagtcatctgtatatgtcggttctttataatttttaaaacacataaaaaagcgggggaaaaatcccccgcgctttctatattaccaggtgtatttcacacccaggtttgctccccagttctggtcaacgtcgccgccgcccagataagtcgcatcagtgtaagcactgaagtttttcgtgaagctgaactgagtgcccagtcccacgcgaaccgcagagccttccacgccgttatcaatgctgtcattgttgatatcagcattgttgtcggcatcgtcatacacgtaagccagtttgaagtaaggcgttaatgcctgctcgccgccgtagttgaaggtataacctgcatccacgccgagttcataacgcatactgtcgtaagactgaccatcgatacgcatgtcgttgcttagctggtagtcatcaccggactggaacaggccagagatcgccgcgtaaggcgtgacgtagccagacaggtttggtttccagtcatagcccagtttcatcccgaaaccaacggcgtcagtcgtggtattaccgtcaacatactgaccgttgctcatggtagcagagaggtcgttgttgaagcgggtgtagctcagggagctgtcgaggaagatgtcgttcatgaacttcgccgacgcgtagatcatcgcagtctggctgtcctgatcgacctgaccagtacgatcgctgatatcacccttcgcgaaaccagccgcaccaccgacaatccacttcgcgttattaccgtcgatctgagtatccagacctaccataatgccgcttacgtcctgatcgtagctaacggtgccattatccgcgtcaaagttgccgccgaaatagctcacccatgcgccgccgttatctgccaggccatgacggctgttggtcagacgggtacccacggtatcctgttgcagattccagatgttggtattagcagaaggaatgctcagcgccatattggcgtaatcagtcagctcttcctgctggagaacaacggtgtcgcccttctgctgcgcctgataggtgtatgcacctaaatcagctttgtttgccgcagtaaagctggcagcggtatccgcgttattgtcatagacgcgaacgatctctttgttttcgtagtcagctacggagcctgcgccggtcgcatcgtcgatgcgcactttatagttaccggcaacgtcaccgttcaccgccagatggccgtcagagttcagcgcgacaacaccatagtcgtagtccgctttagagcgatcgttggtgatatcgcgtgcgttgttcaggtcgctgttcagcacataatcacggctggcaacgttaagcacaccgccatcggtcagcaccatattgtgcgtatcaacctgtcccagacccagcgccagctctgcaccgttgtccacggtaatggtgttggcatacagctcagctgtctcttcagtgagtgcagcacggctgtagctatccagatacaggctgtcggtagccacaccaccgctgtcgccaatattcaggctagacgcattggtcagggtgatggaatctgccagcaggccggagttttcaacattgacctgagactggttgttcaccgtcagcgcgtcgatgttggagatcttacgggtatcccactcggaaccgttatccagcgccacgttgaacaggccgctctgataaacttcttcacctgcaacatgaccgttgctgtcaaaggtagaatcaggccagatgctgtttggagaaagcgtgtgccagtctacatcgctgtagccttcaccatacatctgcgccgtgccgatggcttcaacgctggactgcgcggcgccaacccatttactgccgttggtcagcgtgacatccagcttgtcggtatcatcccagccgttggtagttgggttatagacgccgtcatcggtggtatccgttgccggatcgccattctcgtagaagttgttatcaaaggtgctggagaaaaggatatcgccggtaatggtagagtgatcgaaggtagcggtggtctgcatagcgttatcagacgcgccggccgcaacgatcagcgccgcatcatcggcagccgtggcgttggtttcaccgtagtcgctcggcttcgccgtttgaccgtagaagccactggtacccagatcgctgtacgcaccagaggtcagcacagaatctttcaccaccagcgtatcggtaaagatattgctgctgttagcaacgccttcaacaccgtcgtatggcgtgttatccagctcctgataaccctgcgtcagcgtgatgcccgcgatatgggagttgttctgaataacgatgtcagattcaacgtccagcgtgatcgcgttacccagaccataggtgtccagataatgcgtttcagtggtttcaccattgacgacatcgtaggcgtaatgctcgtaggtatcgttgatggtggagttatcaacagtcaggctaaaacgatcatactgggtatgagtggtaccgtcagtatccacgccatctgcacacgtcgtggtcatacactctgacgtgatcataccgttaatggtgctgttagaaatactcaacgcgttcgcacggccattgacaccatcatccagatagtatgtcgaaataactccgtttacggttgatttattgatgactggataaatgtcaccatcatgtgtggcatctgaataatcccagtcagcataaccataataccagggcgtggacgcggtattgtcatagccaaaagtattatatgttgtgccggatatatctttcgcattggcctgagaagcgatagccagtgtgcaggctaatgcaagttgtgatacaaccagtttctttttccatgtttgcattgggtcatccctcctcagggacgtaagcaagtttgtccatcaaatcatttggcaacattaaattgcggaaggaattatgcagtttcacttcgaaaaggttcaatgaatgattccattaagtccgtattcagacaaataagcttgtaaacccagaacaatatcaatcattatgaataaatattataaattcaactgattgcaaactactttagttgcttcggcacatataataaaaagcaataaatcatttatatttataatcccgaaccaatatagaaacctcaccaatattaaacaccacactgaacaccagaataagttttataatatagacaaaatacatacagcgaatattagtcgatttcgaaaatctaaaagacaactttagtaaaacaccgctccctgctttcaggtacactatacctctttgttccacaaacatcaggcataccatgaccgatttaattgcacgtccccgtcgcctgcgcaagtctcccgcactgcgcgccatgtttgaagagacaacactgaccttaaacgatctggtgttgccgatttttgttgaagaagagatcgatgactacaaagccatcgacgcgatgccgggcgtgatgcgcattcctgaaaagcatctggcccgcgagatcgaacgcattgcgaatgcgggcatccgctcggtaatgacgttcggtatctcccaccacactgacgcgaccggcagtgatgcctggaaagaagacggcctcgtcgcccgcatgtcgcgcatctgcaaagagagtgtgccggagatgatcgtcatgtccgatacctgcttctgcgaatacacctctcatggccactgtggtgtgctgtgcgatcacggcgtggacaacgatgcgaccctgctgaatctgggcaagcaggcggtagttgccgccgctgcgggtgcggatttcattgcgccttctgcggcaatggatgggcaggtacaggcgatccgtcaggcgctggacgctgcgggcttcaccgacaccgccattatgtcctattccaccaaatttgcctcctctttctacggcccgttccgtgaagcagccggcacggcgctgaaaggcgatcgtaaaacctatcagatgaacccgctgaaccgccgcgaagcgattcgtgagtctctgctggatgaagcccagggcgctgactgcctgatggtgaaacctgctggcgcatacctggatatcctgcgcgacattcgcgaacgcaccgaactgccgctgggcgcctaccaggtgagcggcgagtacgcgatgatcaaattcgccgcgcaggcgggtgccatcgacgaagagaaagtgatcctcgaaagcctgggggcgatcaaacgcgcgggcgcggatctgatcttcagctatttcgcgctggatctggctgagaagaaaattctgcgttaatccgctttagcgccgggtaatgacttcgccttacccggcctgctctctgcgctaatcttcaccaaactgcaatacaaacgacatctcctccttctactgtctgggcaagacggcaggaggagtgatcaatgtttagtctcgacagcgttcttgatgacctttggcctcaggcgaggcccgcaccctggcaaaaaagtctgttaaaaagactgcttcacgaagacgaatttcagcagtttgccgccagccaccgtcacctgaaagggctggatatggtggagcaggtactggaacaccttgatattcactgctccgtttccgcccgcgacctcgaacaaatccccgaacacggcccactcattgtgatagcgaaccaccccaccggcaccctggatgggctggcgctgctgtatgccgtttcccgcgtgcgccgcgacgtcagggttgttaccaacaggatgctgtcccaccttgagcccctcagttcattatttattcccgtagataatatgggcggcagaaccgcaaaagcttcgctgatacagatggagcagcacctgcaaaacgccggcgtgctgatcttctttccggcgggcgaagtttcccgcccaacgcgcaaaggcatccgcgataaaaaatggcatccgggctttatcaagctggccggcaaactacgggtgccgctactcccggtacatatccaggcgcacaacagcctgctgttttatgccagtaccctggtctcgccaacggtatccatgctgctgctgatgcaacagatgtttcgccgccgtcacagtcagctgccgatcaaaatcggccagcagattgcctggaatgaccggtttagttctaccctttcatcgcgtgagatggccgagcagtgtcgtcagcacgtgatacgtcttggcaagggattgcctggcgtctttaaaacccagtgcgccattgcccgcccggaagacagggccacgctgaagcgcgaactggcgcaggccgagtgtctgggcaaaaccagcgatggtaaggccatctatctttggcagcgcaacgggcaggaagaggcgcctctgctgcgcgagcttgggcggctgcgcgagattgcctttcgtgccgtggaggaaggcagcgggaagcgccgggataccgacagctacgatgatgactatctgcaccttattctgtgggatgacgatgacctggagattgtcggcgcgtaccgctttatgccaacggccatgcaggtggaaaagcgcggcgtcgaggggttgtacagctacagcctgttccactacgacgaaaaaatgcaggacatacttgagcacggtattgagctggggcgcagctttatacagccgcgctactgggggcgtcgcggtctggactatctgtggtcaggcattggcgcctatctggcacgctatccacattaccgttacctgtttggtccggtgtccatctccggcggcttaccgcctgccgcacgggatctgctggtggcgttttatcgtctctggtttccggccagccatcccttagccgcctcgcgtcaaccctacccggcctcacttccggacgtgctggcacagtttggcggggtggattacgtggatgacctgacaaagctgaaatccctgctcggcaacctgggttgcggcatcccgccgctctataaacagtattccgagctatgcgagccaggcggcgtgcagtttatcgatttcggcagcgatccggcgttcaataactgtatcgacgggctggtgctggtggatctgtgttatctgaaggcaaaccgctatcagcggtatatagaagcacacctttagctccgttgcccggtggcgctgcgcttaccgggcctacaattaaacgtaggccgggtaaggcaacgccgccacccggcaatcaaggcgcacgataaaacggcttatcccccaggatcgtcgcccgctgcataatccttcgctgcggcaggtaatccgcattagcgtaatgctgcgtgacgcggttatcccagatcgccagatcgttctcctgccagcgccagcgcacctggaactccggtttggtgatgtgcgcgaacaggaagccaagcagcgcctcactctctttttccgctacgtccacgatgcgcgtggtgaacccttcattcacaaacagcgcctgtttgcccgtcaccggatgggtccgcaccaccgggtgcagcagcgggggatgttttgcgaccgcatccagccagcgctgatgttcctctttcgttttacggtacttgtactccgggaacgattttttgaagtcatgctccgcccgcaggccgctcagcagggtctggagcggcgcggagagcgcctcaaacgcagcaatcccgctggcccatagcgtatccccacccgtttccggcagctgttttgctgccagaatcgccccggctggcggtgtgtcgataaaggtaacgtccgtgtgccagttgtcattatcgggcgggttatcgttatgggtgtccagcacgataatttcctccaccccttccgcatgcgggtagaccgggtggatatgcaggtcgccaaaacgcagggccagcgcgcgctgctgctgtggggtgatcgcctgttcgcgcaggaatacaacctgatgacgcagcaccgcgtggtacagctgctcaaactggttatcgctcagcggacgggttacgtccaggcccgacacctgcgcgccaatatatggccccagcggggtaatggtcagtcgttcactcattgtatttctccatgccagggcgtcaggcgacgctgtagcgcgcgcagtcccagttctaatccaaaggcaatcgcggcgatcaccgcgatccctgccagtaccacgtcagtcgccaggaactctcccgccgactgcaccataaacccaaggccgcgcgtggcggctatcagctctgccgccaccagcgtagaccagcccaccccaaggccgatgcgcagcccggtcagtatctccggcagcgcgcctggtaaaatgacgaacagcagtatctgcgcgcggctggcgccgagcgactgcgccgcacgtatgcgtacctgctgcgcactctttacgccagccagggccgacatggctaccggcgcaaatatcgccaggtatatcagtaagatctttgacgtctcgccgatgccaaaccagatcaccatcaggggcaggtaagccagcggcgggacgggacgataaagctctatcagcgggtcgnnnnnnnnnnnnnnnnnnnnnnnnnnnnnnnnnnnnnnnnnnnnnnnnnnnnnnnnnnnnnnnnnnnnnnnnnnnnnnnnnnnnnnnnnnnnnnnnnnnnnnnnnnnnnnnnnnnnnnnnnnnnnnnnnnnnnnnnnnnnnnnnnnnnnnnnnnnnnnnnnnnnnnnnnnnnnnnnnnnnnnnnnnnnnnnnnnnnnnnnnnnnnnnnnnnnnnnnnnnnnnnnnnnnnnnnnnnnnnnnnnnnnnnnnnnnnnnnnnnnnnnnnnnnnnnnnnnnnnnnnnnnnnnnnnnnnnnnnnnnnnnnnnnnnnnnnnnnnnnnnnnnnnnnnnnnnnnnnnnnnnnnnnnnnnnnnnnnnnnnnnnnnnnnnnnnnnnnnnnnnnnnnnnnnnnnnnnnnnnnnnnnnnnnnnnnnnnnnnnnnnnnnnnnnnnnnnnnnnnnnnnnnnnnnnnnnnnnnnnnnnnnnnnnnnnnnnnnnnnnnnnnnnnnnnnnnnnnnnnnnnnnnnnnnnnnnnnnnnnnnnnnnnnnncggaacgccaataatgaccgccgccagcagcgccaccagaatacgcatcagactggcgcctaaatgctgccagagcgtggcatccataaagccctgcggcccggcgatagtaattagtttttccagaacctggcctggcgggggcagaaacagcgggctgacccactgctgcgcggcaaccgcccaccataccgccagcagcaccaccagcgtgctgaggcttaaggtgagctggcgagagaacggccagcgtaaggcaaggcgcgtccgccgcgttttttcactgaaaacaatgctcatgagaacgcctcccgttgctcaaacacgcggcttaagacgtattcacgctgttcaataaacagcggatcggatttgatgctgcgtaccggctctcccgccacatagcggcgggcaaactcaagcggcaggcgctccagcacgcgtcccggccccggtgagagcagcaccagctccgtcgccataaacacggcctcttcgatatcgtgggtgattaacagcacctgcttgccggtttcgtgccacaggcgcagcagcagggtttgcatctgctcgcgggtgaaggcatccagcgccccgaaaggttcgtccagcaacagcagctgtgggttagccgccagcgcgcgggcgatcccgacgcgctgacgctgcccgcctgaaagctgccagataaagcgtttttcagctccctccagcccgacctttttcagcatatcgcgcgccgtattcaggcgctgttcacgcgctacacctgccagttgcagaccaaacgcaacgttttcctgaacgtttcgccacgggagtaatccttcattctgaaagaccacgccgcgctctgcgcccggccccgttacccgttttccttccagctggatcgtgccgtgctgatacggtacaaaccccgcgatcaggttcagcagcgtcgttttcccgcagccggacggtcccagcaccaccagcagttcaccgctgtccagcgtcaggttgatctcttccagggcaggtttaccgccgtaatcggcagacaggtttgtaatgttcagcattgcagcccccttatttcacgaagcgatcggtcacgaactggctgtaatccgccgccaccgcaggtactttgccctgctctttcaggaatgtggcagtgtcgacaatcgctttgctcaccggcccgttcagctgctggacctgctgcgcaggcgtcagataggtgttgccttttaccagccccggcacgtcagcttccggcacgccgctcagacgtgagagtttctccaggttggcgggttgtttcagccattcatccgggttgctgatgtatggctgctgtgcgtcgatggcgcttttggcgaaggctttcaccacttcagggtgtttctcggcaaagtccttccgtacgacccagacgtcaagggttggcgcgccccactgccccactttttcggagtcggtcagcacggtgccctctttttccagctcgttgacggcgggcgcccagacgtatgctccatcgatgtcgccacgctgccaggcggcaataatcgccggaggttgcaggttaatgatctgcacctggcccggcttaatgccccagtgtttcagcgctgccagcaggctgtaatgcgtggtggagataaacggcaccgcgatgcgtttgccgatcaaatcttcgggtttcgtgatgcttttcttcaccaccagcgcttcggaatttccgagctgcgacgccagcaggaacacttcaatcggcacctgctggctggcagccaccgccagcgggctggagcccaggttgccaatctgcacgtcgcccgaggctaacgcccgcacaatcgccgcgccgctgtcgaacttgcgccagtcgacattcgccccgctcgctttggcgaaggtgttatccgcctgcgcgactttcgccggctcagcggaagtctgatacgcgacggtgacgtccaccgcctgcgcctgaaatgcccacagcgccagtgcgccgagtaatgtgattcgcgatgaaattgccatagtgcctgctccccttgttgttataagggcagtatttccggcgcgagaattttgataaaggaataaaaaagaatcgctaatgacgattcgtttttagaaaaaaagcgggaaaggatagtgaattttgtgcggttgtttcgccgggtggcgctgcgcttacccggcctacggttcatgcaatttgtaggccggataaggcgcagccgccacccggcaaagacctcagcgctgaaccgtcagcgcagcaatatcctgcggcgtggtgcgacagcagccgccaatcagcttcgcaccggcatccagccactgcggtaaataccccgccagcgtctcgcaggcgtcaccatggtgatgccaggttttgctcaccgcatcataatgctcgccggaattcggatagaccaccagcggcagcgacgtcaggctgtgcagatgcgtcagcgcagcggtggtgttttccagcgcgatacagttgatccccagcgcgacaacctgtggatagctttcgagcgcagaaacgacatcccgcagcggcgtcccgtcactcagatgctcgctgtcacgcagggtaaatgagaaccatgcccgggcgcgaggatacgccgtcagcatcgccgccagcaccttaatctccgggaaagaaggcagcgtttcacaggccagcagatccgcgcccgcatccagcagcgcctccacgcggggacggtggaacgcggtgaactcttcagcgcgacgcacataatcgccgcgatattcagatccatcggcaaggtacgcgccgtacggccctaccgaccccgccaccagcagcgtgcccgcctgcgcattctctgccaggtacgcttcccgcgctttgcgtgccagctctacgcttttgccaatcaacgcccgggattgcgcctcgtcgagcccgcgtgcggcaaagcccgcaggcgtggcctgatagctggcggtgatcgccacctgtgcccccgcgcggtagtagtcgaggtgcacgtcacggatcagctccgggttttccatcagcactttggccgaccagaggctgtcggcaaggttacaaccgcgcgcttccagctccgttgccatcgccccatccagcacgacaaacggctggttttcaaggagggcggtaagcggattattctgcgacatgttcaggctcctgcgtggtcaggtttcgggtcaggtagtacgcaccataacacagggcgacaaacggaagcccgcaataaagggcaatacgctggctggggtcaaaccacaggccgacacaggccaccaggcagaggataaagccaagcacgggcaccagcggataccatggcgcgcgatactgcaacgccgaaagcggctgcccggactgcacgtgacggcgacgaaacacgaagtgtgacgcgcagatgctgatccacaccgccaccaccgcaaaaccggaaatggctgacagggccacaaacaccgtatccggcgcaaccacgctggagaacagcgccagcacgccacccagcatggaaacggagagcgccgtcagcggcacgccgtttttgttgacgcgggcaaagcagcgtggcagcgttttctcgttagacagagaccacagcatacggccagaggcgtacaggcccgagttcgccgccgagaggatcgccgtcaggatcacgaagttaaagatatccgccgcatacggaatgccgaccttttcaaacaccaccacgaacgggcttttctccacgccagcctgctgcatcgggatcagcgccgccagcacaaacacggtgccaataaagaagatgatgagccgggcgatggtggtacgaatagcaaccggaataaccttgtgtgggttttccgtttctcctgccgcgatgccgataagctccgttccggagaaggcaaagttgaccgccaccatggtcatcaggatcggcagaccgccgtgcgggaaccagccttcggcagtgaggttgcttaagcccggcgccggtgaaccgtcctgcatcgggataaaaccgaagatcgccgccccgccgagaataatgaaggcgatgatggtgatgactttcaccagcgagaaccagaattccccttcggcgaagaagcgcgtggaaatgacgttaagagcaaaaatcaccacgcaaaagacgacgcaccacgtccagacgggaacctgcgggaaccagtactgcatacagaacccggctgcggtaaagctcgatcccagcgccactgtccacgtaagccagtagagccacgccacggtataccctgtcgccgggccgagataacgagcggcgtagacgtggaacgcgccggtttccggcatcgccacggaaagttcccccaggcattgcataaccagccagaccaccagcgcaccaataagatacgccagcagcgtgcccgccgcgccggttgtcgaaatgatgtatccggtattgaagaataaccctgtgccgataacgccccccagcgagagcataatcaggtgacgggttttcatggtgcgcttaagctgcccgttttgttgttctgtttgcatattaccttctaaacgtatggacatctaaacatccaaagaagggtgttataccgcgattgttaacaaaaagccacccggcacgacttcggcgcaattattggtaaatctttaaatcagttctatagtcgacacagtttcttcttcaccaggactcactatgcgatttaacggactgaccaaaggtttctttattctcatcctagcccttgttacctgggctttctttgacgtgctgtcaccctatttctcggcgattctgtgggccgcgatcctgaccatcattttcaacccggtgaaaaacaaattgcgtaccgcgctgggcgatcgcaacgggctggcttccctccttacactcggcattatctgcctgatcgtgtttattccgttgatggtgatcctttcctcgctcgcggtggaactgaacatggtttacaccaagctgcaacagaacaacacgcagttcccggaagtcatcgccggtattttcaaccgactgccggactgggccagcggcttcctagcggatcacaacctgaccaacgccgcgcagattcagaaaaagctttccgatgtcgcgttacagggtggacagtatctggcgggaagcgcgttcctgattggtaaagggacgttcggctttgctattagcttcggcattatgctgtacctgctgtttttcctgctcaaagacgggccctatctggtgcgccagatcctcgactcgctgccgctgtctgacttcgccaaacagcacctgttcgctaagtttgtcggcgtctcacgagccacggtaaaaggtacggcggtcgtggcagtggttcagggtacgcttggcggtatcgcctttgccatcgtcggtattgacggtagcgtactgtggggagcgctgatggcgttcctctccctggtgcccgccgtcggctcggctatcgtctgggttcccgccgcgatcttcctgtttgccactcaccagctgtggcagggtctgttcattgtgggcttttttgtcattatcgtcgggctggtggacaaccttttacgtccgctgctggtgggcaaagacaccaaaatgccggactacctgatactgatcaccacgctcggcggtatggagctgtacggcattaatgnnnnnnnnnnnnnnnnnnnnnnnnnnnnnnnnnnnnnnnnnnnnnnnnnnnnnnnnnnnnnnnnnnnnnnnnnnnnnnnnnnnnnnnnnnnnnnnnnnnnnnnnnnnnnnnnnnnnnnnnnnnnnnnnnnnnnnnnnnnnnnnnnnnnnnnnnnnnnnnnnnnnnnnnnnnnnnnnnnnnnnnnnnnnnnnnnnnnnnnnnnnnnnnnnnnnnnnnnnnnnnnnnnnnnnnnnnnnnnnnnnnnnnnnnnnnnnnnnnnnnnnnnnnnnnnnnnnnnncctgctggaacctcttctccggccgcgaccacgcaggcaacgccgaggagctggacgcagactttatcgaagagggaaaaaaccctccggatctctaacgaaacgcgttttgtcaggcggccctgtgccgccttttttttcgcgataaatcaggggttttctataatctgaaatgaacgctcttccacatttgtcgtagaaggatccaacaggtgcgaatcgccacgatcacaaactgggcctatggtgtcacggtgtgcctgaccattgcctccggtatcgtcatgctgatggcttcccatgccgacaacgtagagcgtcaggctgttaagcaacgacaaatttttgaccagcttacggaagagattgaagcagaaacctggatgctctccgatttagcgcgcctttacgccatcaaaaaagagcccgatgtgctgaaagcgtaccaggcgaaagaaggtgaactgaagaatattgaacacaaagtgggacagttaaaagatacgggcgcaacgggcgaagagctggcgctgctgtatgaagggctgaagattgttgatggcctacaggatgaacagcaggcagcaattgccagcgtcgcccggggtgaggaacaacaggccattgcgttactcttcggcaaaatctacgaacttgaaacggaacgcgcccagagcaagattgaccattttcgtatgctgctggataagcgcattattgccgatgtccaggcagcgaccaacacgtcgaaaacgctgcgtaccgcctcagaggtgatggtcggcctgaccgccctgctcttcttattcgtgatgggctttattctcaagcaccgcgtgctgcgcccggtagtgcgcctcagcgatgtggttcaccgcctggcctcacaggattacggcgtcgaaacgcccaatttcaaccaggtcgatgagataggcgatatggcgcaggccattcgcattttccgcgagaacgggctggcaaggcagcggcttgaaaaagaacgcgacgcagactgggccatccgcgagctgctcgcgcgaatgacccagcgcttgcagggatgcgagaacgtcagcgacgtgattgaggtggcagagctgtttgctcccaacattgcgccgggtatcgccggacgtctgtatatcctggatcgaaacccgtgggagatgcgctgtgcggcggaatggttatctccccagggagaaaaaaatgctttccaccccgatcaatgctgggccatacgccgtggtcagagccacccaccggtcaacggcgagccggatatcggttgccagcatctgcctgaatcacaaaaagacagttcactgtgcgtgccgctcattgcgcagggggaagccattggtttgctgtcgtttcaaaacataacgcctgaaacggcaccgtcccgcgcatatctcgaattaatggcggaagccctgggtctggcgctggccaaccagcgtctgcgcgatgccctgctggaaaaagcgctattcgacccgctcaccggcttgcgtaaccgtcaccacctggaagataccctgcgcactcagatagctcaggcaatgcgcaatgatgagccggtgagctgcatgatgatcgacatcgatcactttaaaagcattaacgatcgcttcggccatgaggctggcgatcatgtgattaagagcgtggcgacaattgttcagcgtgccgtgcacgatgccggcctggccttccgctttggtggcgaagagtttctggtgctgctaacgggtgcggatgaggaagcggctcacgcctgcgcaacggagatttataacggcgtccatacgctgtcgctgcgctatgggcttgctgagattggcccggtggatgtgtcgatcgggatagccagctacccgcagcacgcccaaagcgacgacctgctgcgcgcggcagacgtggcgctttaccgggcgaaagagttggggcgctcgcggatcgtcggtttcagtatgctggagacgggttaaccgaaactcagtgcaaatgacgtcagaggtacgcgcactctcttattccctcacattgagggtgcgttatcattctttgtacatataaatcaatcttaacgatgccaccattgataaaaatgggggtgcgtaaatatatcaataatcaaagcgatcattttttaaacccggtggctaattacactgagtttttatgttttaaaaaacgtaagctccagccagaggtctgcaatcacggggcaaacaacgattatccatttgattttaatacatttaatgaagtatcgtttgcaaaaagccatggcgttcaacaaaatagacaaacttataggataaataacttataattcttatacttctgttaaaaagaggaggccaatatgcgaataatcctaatgctgtgctgctttttggtacaaagtttaagctgggctggcgaactgccaaagcctgtgggcaaacccatcttaaccattaccggtaatatagaaaatacgaacgaaaatggaaaagccgtttttgatattgccagcctggaaaaactggggatggtgagtttccagacgacctctccctggtataatggccgcacgaagtttgagggtatcccgatgcgcaaactcatggagtatgtgggtgctaagggttctgttctgaatgtggttgcactcaatgattatactaccgtcatccctctcagcgacttccagaaatacaacgccatcctggcgttaaaggtcaatggcgaatatatgcgcatccgcgataaaggtccgtcattcatcgtctacccttatgacagtcttcctgaactcaataatcagatttattactcgcgatcggcctggcaggtcagcaaaatgaagattgaatagtagttcaggagaacataatgaacaggatactggttggtatcattttttctctttttatcactacgggatatatagcctttcttgtctacgaccgtcagcaggagttgcaaaaattgactcactacactgagtcctggtctgtagctcaactggtatctgaatattaccgatttgaatcatggattggactgtacgcaaccgagactgatgacgttacggtagaccaggttcgcatgcgcctggaaatcatgctgagccagaatgatttattgaaagagggcggcctgggtcgttatataaacagcgcgaaagcgcatcaggtgctcgccttacgcctggaaaatatactgaactatctggatggtcaccttgagaaaatgagccgttcagagttaaagctctatctgaaaaatatgcatttactggatgcaccgctaagccagctttcatcaacggctttaacaaaagatgttaatacaatcaatgaaactaacctaaaaatacaggttctatattatatttattcagcactttcgctgttactggttattttaagcttcatactgggctttttgattatctatcaaaataaaaacattctcaaagcacatacacaggttaaaactctggctgaagaacttcagctgtccaaagaaaccctgcaaatccagaatacaaaactggaatacgatgtttatcatgactcccttaccggcatgaaaaaccgtcttttcttctgggatgatctcaataaacttaatctacaggctgaggaaaaacatatttcggtcacggtgatgttattcgatttagaccggttcaaagaggtgaatgatacctacggtcatgatgctggcgatttactgttacgtgaggtatccacgcgccttaacgctttgagccgcttttcagagacattttatcgtttgggcggcgacgaatttgcgtttctctccagtggcttaaccgaagccgcagccgtttcacgcgcgcgagaaatcagtgatagcatcagcaagccctatacaattaataatcaacttataaaaatagccacctgtgtgggtattgttttatcggataacgaacgacgttcagattacctttataaatttgccgatctggcgctctatgaagccaagaaagaaggttctcagcaaatcaaagtcttccgccagcgaatgctacagaagttgcaggaaagcagaacccttgaaaatgatatggcaagagcaatagagaatgatgagtttattgtttattaccagcctattgtgaattccgtcagcaaggaaatttacggctatgaagcgcttattcgctggatgcaccccgtcaaggggatgctctccccggatagctttattttcgccgctgaaaaaacaggcatgatcaacgagataggtaaaactgtacttaaactggcctgtagggaggcggtctcctgggctgttccggccaggatctccgtcaacgtctcgcctgttcagttaggcagcaaatcatttattaatacggtgcagtccgttctggctgagaccgggctcccggctaaccgtcttgagttagaggtcacagagtcttccctcttcagtgacagaaataaccccattgcgatcctcaaaaaactacgctcactgggcgtaagaatttctattgatgattttggcacgggttattcgtcgctctccagactcagcgaactgaattttgataaaatcaagatcgataaatcttttgtcaatccgatatctacgcaagaagatgcgcttaatattgtgaagctgattaccggtatggctaaaagccttaatatgggcgtcattgccgagggcgttgagaccgaagagcagcttgagcggcttcaggctctgggttgcgagcttgtgcagggatatcttttcagcaaaccacagcctcaggtcgacagcaaaattaagagcggccaggaatgatcccctctcctcagcccgataccaaccgggatcacatttttcacccctgggtattcactgacaataaccaggtgttatcattcaccccgtaaatacctatcaactcaatccgaggctttgatgctggagaatgtaatcatccgataatcagcttcccgacctttccaggccggactgattatcaatgcgccgaaatcgtatgcggacaccgctgtgtgtttgcacgttttgcacatgatgattaaacaggttttccagtatgaatttatcccgtcaggaacaacgtaccttacacgttctcgccaaaggtggccgtattgtgcacgtccgcgatacctccggccgcgtcaccgccgttgaatgctatagccgcgaagggctactgctggctgactgcacgctcgccgttttcaaaaagctcaaaaccaaaaagctgatcaaatccgttaacggtcagccctaccgcattaacactacggggctgaacaatgttcgcgctcagcctgataatcgttaaggagaggatgatggatatcccacgtatttttactgttagcgaaagcgaacaccgcattcataacccctttacaccagagaagtacgcgacgctgggccgcgtgttacgcatgaagccaggcacacgcattctcgatctcggcagcggctcgggagagatgctttgtacctgggctagggatcacaccattaccggtgtcggtattgatatgagccagctcttcaccgcgcaggccacgcggcgcgcagaggaactcggcgtcagcgaacgcgtccatttcattcataacgacgcggctggctacgtcgcgaatgaaaaatgtgacgtggcggcctgcgttggcgcaacctggattgcgggtggcgtagccgggacgatggatctgctggcaaaaagcctcaagcccgggggaataatgctcatcggcgaaccgtactggcgtcaggtacccgcgacggcagagatagctcaggcctgcggcgtctcgtcgattgcagactttcttactctgcccggtctggttgcgtctttcgatcaacagggctatgacctggttgaaatggtgctggctgatcaggaaggctgggacaggtacgaagccgcaaaatggatgaccatgcggcgctggctggaggaaaacccagatgatgacttcgcgcaggaggttcgggcggagctgacgatagcgcctgaacgtcatgtgacgtacacgcgggagtactttggctggggggtgtttgcgttaatggcgcgataatatggcgctggcggtatagccttttgggttatgccgccgatcaacttctttgaggtacaaaacgatgacgcgaaaatgtgcagccaatggcaatatttgctgccatggtctgagaacgagatttactggaatgtagggtaactatttgatttagatgggataataggattaaaacaaacaagacaacacactgataaataacaacttatgagacatcattttgagaaatacccccaaaagtacccccattttgttctcactgcctactgctttctgatctctaatccatacaacacaaatgacatgggaacaattcatattctttattaactactgcacaatttaactacgaaaaaaaatacaataaaaattttttattaaaggaaaacattaaaaatcaataaattacaccatttattattatcttataacaaacacattttattatgcatttcttatttaataatttctaagctagtaaatcttctcaaacggtgagattctctagaaaactcaaaataaaatataggaattcagatgacccaagatatcgtcgccgcatcatgttatgctgaatggcttgaaccaaaaattgtcattcccgctataacagccgtcatgactggtgttctagcatcagttatcgtacctctcttcatgcattattcaaaatcaaaaagagaacagaaatataaaattttagatataagaactaaaatatataccgaatattttaaaaaaatatgaggaagcagctaaaaatatagatgtggattataaagtatttactaaagtcactttgaaaagcgcatttatatatttgttggaatctgatagctcagctgtagcaataataaaactcagcgatgaaatcagccgttttactttccaaatccagcagtctcatcgaaaatcaactgaagaaatttcttctttgaaaattttaggatctgatgaactgtttcgattaataaatgactttgaaaagctgaatcaagaaatcattatgttatcttctgaatggttgaaagaattaaacgaggcattagtcacccccgattttgaagcacctatagcaaagaaaatgaaaactaagggagaggaaataaatgaactcaaggataaaataattaaacaaatgagaattgaacttagcattggtcgataagagttaatgagtagcatagaatatgctattacaatttccataaatcataagggccctgtttaatcgggcccttcaaaatatatactttgtcactctctaaaaatttaaaccatttttacctgaagcgctcaaataatgcgcccagtttatcagcaggtatgtctttgacctgtgcgccttgacgttctacccactttccattccaatgagatggtgagtcttgaccctcaacctcaaaaacaaacaccgtcttatcataataacgtacgcatttaagatggttataaatgtacgatcttaatggttctgaaagccctgagcgccccactctttcggagatgtcttggaacatttggtctagatctttacccgtgaaattagcttcatgatcgaccccagttatatggaaaccattatatgagagtgctctgcttccaaaaacctcaagtactctggctgctgtctttgccgtttcagctacacctactatgacatagcctttatgccctttgcctatgttagcgattgcagcacaagtctccattattttatcaaatgatttttcatcgaaagaaggtttaggatctaaagtaaagaaaccttgtttgaaatcgtaggctgcttgttctgtaattgagtttgtaagcaaattttggagtttagttatccaatgaactttcgctggatccggattatgatcgttctcaaaaaatccttgcacccaaccaataatagaatcgatcattctgcttcgattatcagccccccatcgcccaccatcttgaacctgtatattctttccacaatcccttaagcgcgcaataagccctgcactatcagaaataaccataccctttttaattatcaaatcatgaagggcgaggaaaattacttggaaataacgaggcactggattaccaccattcccattagggaaaatcaatccagcgaaagtagcctgagcctgactgagaagtaaaattaacgcgtcatgaactcgttgataatcaagatcaacaagctctacacttctctttttgacggcttgatcgattgaatcaaatcttgccttgctagttatcgtttcaggatatgttgcgccaaaataatcatccaaaagttcagtacgcgatgcaaccggtctgtcagaaaccatatatgcaactatgtccgccaccaactcttcatcacgactttgacgtagctgttctttcgtcaaaattccgtgagcaatccaaaaaacagtgtctgcatttataccataatgcaattccctgttagtgatactaattttttgcatctcacttaatagtaagagatctgtattcgatgtatcaccacgaactcttgcagagatttttcgaacacaatcggcgaaagcattagttgctcccgctgctcgcaattcttgtcgtgataattgacgtccgcctgagttgattcggcgaaatacttcttcaaccgactctctttcagcagcttcataaattgaaagaggtacaggatacgatgcaattgcaaggcacttcgctcgttctaggactggtgccctttgctctagtactccacgatctaataagtcttttgttgttgcaaaagtattaagatcaaaataacaaccatcgaatgagaaatcgttcgtgataaaagacataatggcattcatacgttgcataccatcaataatctctagagtaccatcgtttcgcccaagaggttctgctaacaatataataggtatagggaaaccttttataattgaatcgataaaactctgtttttcttcaatagtccaaatcagcttacgctgatactgacgattaactacgtattttttatcctgatagttgatgaaaactcgctcaacttgttcgccacgaactatcaattcctgctgtattattgccatttcatcgctgtcctgagctgttaaagtgacactaaagaatgaagctagcttgtcataagcattttttagtaacactttttattcagttgcttaaaagaatttatcttttaccttactacgcacaacttcacaagtcttgcaatggccttgtttgaccattttcataaagatacatgttttactttacagatcatacagttacgaacatggctgaacctattactttaaccgaaattttaaccgacctaattacgtaaattaaaaataaatttgaaagtgtcatctttcacaaatttttgtctttcttatgatggaaatctggttagctatgcggattaacagacggaagcaactgtaacttagagcgcctacagccaaaaatccccagtggcgctgccggtgggtgacaacttttgacaactcaatctgaacgccagcgtccgggcaaaccagaacagcgatctgaaagaggctcgaggatggatgcaaagggggagtgcttaacacctccccttcacgagttcgtgtacctgaagtttactgaagcggcagcggctgacacttttttggtgaggcataacaaaccataacaggctgacatctgccctgcttcgcatcaggattaacaaaagttaacagccaagggctcaacaaatctcaacgccagccctttacacttctgccgtagctgctgttcgaaggcgtcaggagccgttaggttgnnnnnnnnnnnnnnnnnnnnnnnnnnnnnnnnnnnnnnnnnnnnnnnnnnnnnnnnnnnnnnnnnnnnnnnnnnnnnnnnnnnnnnnnnnnnnnnnnnnnnnnnnnnnnnnnnnnnnnnnnnnnnnnnnnnnnnnnnnnnnnnnnnnnnnnnnnnnnnnnnnnnnnnnnnnnnnnnnnnnnnnnnnnnnnnnnnnnnnnnnnnnnnnnnnnnnnnnnnnnnnnnnnnnnnnnnnnnnnnnnnnnnnnnnnnnnnnnnnnnnnnnnnnnnnnnnnnnnnnnnnnnnnnnnnnnnnnnnnnnnnnnnnnnnnnnnnnnnnnnnnnnnnnnnnnnnnnnnnnnnnnnnnnnnnnnnnnnnnnnnnnnnnnnnnnnnnnnngactacttttccctagtttctcaacgaaaaagtgtcaagtttgaggggctgggaggtttacagtttttcgccgtccagcaggcagagtggcattaaaccagttttgttccagtcatccagcgtatcggggtgcattgtggcaacgaagccagctcagaacgaagaaaccgtaaagcgcccgctgcacggtctttgccatagaagctgtgggtttcttcatccagtcggaagagaatcagcaattgttcatcgggctcgtgctgaacatcaaaacccagttcagcgactgcggcctctattcgctggccagcatcaatatcagctggcagcgctttcccgccgtcatgcttccatacccatgcggcggcctgcgcccacgtcatttcagtctggtgttcactagcaccagcagaattttgtttagcctgcgatgcgtcaacatcaactttatcgcctgaaataacaatttcaccgcgggctatccagccataaacagtttgccggctgacgcccatatgcctggcgtaggctgatttacttaacagcattctgaagtttccctccgggcagaaaaaagccgccctcaggcggcctgcttctcttctgaatatgtctgccgctggctgcctttgagcatcgcactggcatgttcgcttaactgatcaaggccggtcctgcgtagctgaacttctgatggatcgtcgttctttccgtacacgagatgttttgcctgtccgctcaaatccagatcgtttcggatgacgtccagcaaatccgcctcagcttcggcctgctgtaccgggggtctttctctccttgcagtactcgtgattaaactcccgcatggcgctttctattccttctgaaaattatttcggcgtcagcggcttgtcgaagccgttcgtctctaagaatgccagctaaacagcagcggtcagaaaaatgcggacagatagtaataaggcatggaagggggcactaaagcgggcaggaattagcaatttccgcttccatgacctcaggcatacatgggcgagcaggctcgttcagtctggcgtttcacttctggcgctgaaggaaatgggggatgggagacactggaaatggttcaacgatatgcgcatttatctgccggacacctgacagagcacgcgagcaaaattgacgcgattattggtctcaatgccacaaatacggcacaggaggagaacgtggtttacttgaatgtaagataagtaattgaaataactggtgccgataataggagtaaaatacagcaaataaccacatgtatttactatattttatttttacaaattagatagatacccgcattggtacccgttttgatttcgctccctattaaggaacaaaacacgctattccgtagccctgtaccaggcttgccaacgatatttatccagtcgtaactgccgcaggcataccgctgtttcgatgtctgcttgcagatcttcgtcgctgtctgttcctgctttactcgctcccttgcatggctcctgcatcaaatccgctgatggagttggccgcatcgagggctcgctgccgcagctgcacagcgtgatcgtcaaaatcgcacttagtatgattcgggtcgttaacatatttcaccacgtcgcgataaatggtccggtaaatcaccttgccttctgcgctggccgccgccgctttctgttcaccagcggcgacggccttctctgcctttttgctcttcgcctgatattcgctattcaccttgtcgctgtgcgcataccagcctttcagataacccgtgtaaaaggtaccagcgaacagcgccagcaaaacggccagcactaacatctttgctttaatggtcactggtctatcccccagcacgtcagtgcgctttcctgatcccggcgctcaacctgaccatagcagccattcttctggccttttgtcagtcggcagtcacgtccaccatcttttatccaccagcggatcgactcgcaggcccctttgcggtcaccggcattgatgcgcctatagaaggttgatgggaaacatttaccggggccgatattgtacgggcagaacgaagcaataccggctttctgtggttcggtcagtggtacctttatattccggtcaacccacgccagagccttatcccgttcaatggcgtttacctggtcgcatttcgcctgcgtcaacttcatgccttgcgccaccggctttccatcaaccatcgtggcgccacggcatattgtccagatcccgcttccgtctttgtacgctgtgaggctgtttccctctttctcattgaggaactgatcgagaatttgaggggctgaggcgccagcaaggatcagcccgagaacggcggcgctgagtttagtcttgctggtagccattatcacgggcctcttttcgacgatcgtctttaattttgaaatacaggttggtcagatatgtcagtaaaccaaagagaatactggcaaggacgccgattgcagcccactggcttgggctcactttatcgaggagttgcagcagccagtaaccaaagctgcctattgatgttccgtaggatagccccgcggctacgtctgaaaggttgttcatcctcatgcctcaccccctgtggggaaaatcttgtagtgagttgagggtatgcgttgaggccggtcggaatcccgaccatattcctgcgtcgatcaacagccataacgtgtaaatttagtgatcgatgtcgatgtggttgatgcaactaaccaagtgaggatgacgatctttatcaaaaggtctatcatccattatcttaattttgccacgtatggcactttggaatgatggttacgaaatgagctataaaaaattcaggctcgatataaatggtttaagagcctttgctgttctgagtgtagtgctttatcacttcggcgtaccttatgtatccggtgggtttgtaggtgtagatgttttttttgtgatctccggtttccttatgactgggattgtgcttgagcgcgtagatcataaaggagtactggatttttatattgctagattcctaagaattgtaccagctctggtgattgtagttcttgttttaatgtttttcggtttatttgcgttaagtacaaatgaatttgaaatactgggcaagaacgcgatatcttctttactattttattcaaataattattacgcaatccactctagctattttgacccttcgtcagaattcaacttcttgcttcacacttggtcactttcagctgagtggcaattctacattctttaccccgtactggtcattgcgattaagaaattacggctacctgttggtattacattatttaccatattcgccatatcgcttgcaatcacacttatgcgcgtgactggcaccagagaggatatcttctatcttctgccaacaagggcctgggaaatgttggcaggcggccttgtgtacatggcatctgtgcgttacaaacttccagactggttaaagaattgcgaaggttacggcatagctctaattgtcgttgctgttgtgatgctgcatagcaatggttactggccaagttactcaactttcgcccccgttataggcgctgcgatagttcttctggctaatgaccagaactccgtttttacttcaaacaggattgctcagtgggctggtaaaatctcttactcagtttatttgtggcactggcctattgttgtggtcatgaaatattatgacattcaatttaacgctatcaatatttctcttggtgtgattgcatctttcgcgcttggtgacatatcttacaaaatcattgagaacacactcagaaaaagatcgaagcttaaagttaacttaatattattcgttattgtatttgttatatcagctactgtatctgtaactaaggggttagcatttagattctctggtgatctgaaagaagttgctgagtaccgaatggataaaagcaaatggttgcctgatacatgcttcctttccactcatcagggaccagaaggtttctctggttgccaggataaaatgaatgcggactctatagtaatctggggtgattcgcatgcagctcagcttgcatccggaataagagatgttattggtaataatggaaacgttgttcaacgcactgctgggctttgtgggccgattccaggagtagccatagagcctaataaaaaatgtattgatatcaatgagtatgtgtacaaagaaatactaaatgctaagcctaagacagttattctcgctgggctatggaacagatatcctatacgagaaaaattggattctcttgttagaaatatacataattcaggcgtaaacaagataattatcattggtccattcccttactggaaggataccgccttaaatcttatagaaaagtatgggaatgacgggtttggaagcttgccgttatcattaatgaatgaaggagtgtacgtgttggggaacgataaatatctttccaaatacgcacatgacatggattatgtaacgtacatatcaccagttgaggaaatatgtaaaaacggaaaatgcataaacattatccacgaaaacggcaaagcatacccgttacaatttgataactcccatatgtcagtggaaggcgcacgctggtttattgagaaaaataaaaaattattttaaatgatttaggtgggtagttttacccacctaaaccttagattatcaagttactctgaatactgagggatctctgtagtcccaccattcccctactgttctaccagtaatgctacctgatggaggaagcgtgtttccgttacagtacacgcttcttgctcctatagtagcactcagagatgtaatattattattagtgtagtatgctctctcaacaccagtactaccaccgcatttattccccgatatactgcatgcatccattctgaacgtcatagcagaggtcgcaacggtatcgagactgatagctcccacctgacatctccttatcgtccatgagtccagcaaagtccctgccaaggtaccgttgattgttccagcgcaatcttcaaaaattacctcattagtaattttagaagcggaaagatcggatattgtnnnnnnnnnnnnnnnnnnnnnnnnnnnnnnnnnnnnnnnnnnnnnnnnnnnnnnnnnnnnnnnnnnnnnnnnnnnnnnnnnnnnnnnnnnnnnnnnnnnnnnnnnnnnnnnnnnnnnnnnnnnnnnnnnnnnnnnnnnnnnnnnnnnnnnnnnnnnnnnnnnnnnnnnnnnnnnnnnnnnnnnnnnnnnnnnnnnnnnnnnnnnnnnnnnnnnnnnnnnnnnnnnnnnnnnnnnnnnnnnnnnnnnnnnnnnnnnnnnnnnnnnnnnnnnnnnnnnnnnnnnnnnnnnnnnnnnnnnnnnnnnnnnnnnnnnnnnnnnnnnnnnnnnnnnnnnnnnnnnnnnnnnnnnnnnnnnnnnnnnnnnnnnnnnnnnnnnnnnnnnnnnnnnnnnnnnnnnnnnnnnnnnnnnnnnnnnnnnnnnnnnnnnnnnnnnnnnnnnnnnnnnnnnnnnnnnnnnnnnnnnnnnnnnnntaaagaatgtattaacgcccggagggagagtgagattaaccctccttaaagtccacttacatctggaagcatctaaatatgaggatgccataattcccgggaatcttaattgaagattccacccaccgattattgactcctgagtgatatcttccataaccacttcatctgggtaccttgttgtcatggaaccaccaacgttaaaatataacggtgcaaacaaaatattttcagcaccataagctatggtcccacggtataatttaacgttcctgattgttatttttttaccgaggtagagcttactccttgtatagtcaaggctaccacttatcccagcctgcatacaaacaagagcatacggggaattgcttgcatttttaagttgataggttattcgaatattctctacgaggatgtccccttcccatccctgtccgtagtcatcacgcgtctgaacaaggttttcagtattgtattgccctccagcatagaaaacatcgcaatcccttactatcagagttcctccgcctgtaatatggatcccgcctttactatatccaccgttaatattatcagtgatcccctggaatttaatacgctgagctgtaaaattccaggccatagcgtggcaccccatttttgcgccagtaacacagtcgctaaccaccgtatcccgcatgaaattaccatcaaccagaccccaaccaaacagtgcagaacaacgctgtatatttaaaccataggtggcgaatgcattaaccagataatctgagagcgcgaaactgttacgccagtgacaatcaaaaacattgataaaagcgactttgttgctttcatagaaggcctgtaaaaaaatggattctgaccttgcatctaccacaccaccgatgaatgttctgttattacattccaccctgacaacagaccgaattatcagtgaacttgagaaggttcctgtcaggattatcttcggagaaagatattcctcttgtggtcggataggtcttgttgcgtactttactgttccggtgagtccgtacagcgatggtgtcgccctaaaattcccagaatcgtttattagaatatctgattttctaataatgccagaaccgccacggagataggcattatcagccgaagtctcagcctcgtaaccaaacgtagaaaaaccaaaggtattcaatgctgaactggatatctggccgatctctgtgatagatgcattgaatcctgttccttcaatagttgcagggtctttaaccaggaatatatacccaccacttcctgtaatgacactatcaacgctactggcatcaagagttactatcagcttactcatgtcccatggaacatcataggtattgatacctgaggttagctttatggctccataacagacagccttacgttttagatacgctaatgttcggaaaaattgctgcatttcgaacgtgacatcaacatttgaaaccgtatcgcaccacgaagaaagatcgcttatttccttcccgttcaacaggcccgcgcagtaccacagagggtcgtcatacggatcaaccccgggcgacaccgcataaggatacgtcccggtataaaaccaccacagaccgtcctcatcctgcataacctgccggttattctcaacgagtccgccaaccgcaaaataaccttttcgctgaaattcgccgcgctcatagtcagcccacacggtagcaccatatgaactgccaatcttcttatcgctacccggttttgccagatccagtagcacatctgaggcagagccagaaggaggcatcacgaaaaccgggttgccggcatcatcacaacctaaaagcttgttccgtcgttctgctactgccggaagcggattaacatagccttccggtacccgtaatgctcgattgaggtttgtctgccctacctgattaacaaactttttagtggcagcgtcctgatcgtttatcgggtcggcgaggttagcgatacggtacccttctgcgttaaacggaccacccagcaaaggtcgacgcaatgccagccccagataaataaacgagcgctggattgccatccacaaacggtcgaaatccttgtttaccgtgtcggccagcaagtcaccgttgtcctggtagtctgtcaggcggtaagtgggtacgacgcgctccagcataaccacagagccactggctggtggagtgataaaggtgacatccccaccaccaacgtttcctgcccctgacacgctgtatccactggttaccgttgtgccgttgatcgacacctggatatcaccggcgttgatgatgtagaactcgaagggaaaaacggtcgtcaggccgttggcgttataaataatatagggcgtctggttgggtaccgacatgatgcgaaacctctggcaggttaataatcgacgtcgacaagatgatctccgtcacttaactgccaatcttcgcgcgcatgcccggtcggaatcccgaccactttaccgatacgtacaggagtctgacttattgcgcccgctccggagtcaataaagtcatccggctggttggtcagagccgggttaaagtcacgcatctggtcatacaccgggccgtcaagcacatcggtatgcgcccacaggaaccgcgacgacagcggcgcttcaaacgcatcgaggatacgtttctgtttgttggtaatgctgaattcttcacgtacgccgcacccggtacctttgagcgcctgacgaagcaattttcctgcgaaactgccggggccgttaacttcgacacaaaccaccgggatctgatatctgagtaccagctctttgatctgcgccacctgcccgccagtgattttgtcgttatcgtcaaactctgccagctcacccgtaagcccctggcaaatgtgccagtacaaatgccctcttgcatccgtcagcatcagcgagaacgccgaagcatctgccttaactttacctgtggccacatcccaccaggcgacagcgccaacgatttgcacgttacccagccagagcgaggccgtacgattcgcatagcggatctgcgggtggatgttgtactcgcgaatgcggtcgggatcgagacgaacgtcgccgacgggtttactatgcagctgatactggctatcccactcgttaatcgtgcgcgtttctttacgacgattctccatttcctcccgagtgaatcgctcaggccaggcgcaatccgcataaaaatcgataacggtgtcaggcacggtggcaaattcaacaccgcttgccgtaattttatagtcgacatcttcaaccagtaggcgggcacttttatggatcccggcgaaaacatattccggtctgaaagataactcatagcgcagctgcgtggcgtctttcgcctcaacacgtttttctttctcaaacagccggatggtaagacagtcagcgcccatagactccacctcatcgtaaaggctgtcatgcgtgtgcggcgtaccaatgtagagcttgcggccgccggggatcaggatgtgcgtttgttcgcccagtcgatagcgcagcttttcacgcgcctccggcgtctggatattgcggggtacttctacgtcatcgttctggcattcgttggcacgggcggaggtaacgttagacagaatgcctttggcgtacatgctgccgttacgtaaatccagcgcgccattgacccaccactgctctaccgtcccctgcccgtctggtagcatgcctttagtcagcggatggttacgcaaaacgttctgcgtatcgcggctggttttatacgcggtgccgtcagattcagactgatgcaaaatgcggtactgtcggtcacagtagtatcgccaggcattatagactgcaaggattgttgatttaccgaacccacggaaacagcgaagcaccgcgagattaccgcgatgctccagccagtggcaggccttatagtggcagtccggtacattccactgcatccgttccgcccacatcagaaagaaggcgaggaaggagatcattttttccctttctggagacgctctataatggcggccgcttcacgctcagcctttgatacctgctggcccagcgcaaaggcttcgtcatcctgcccggggttatcagttggcgtccccccgcgcgtctgcataccgataagcgaatgcaccttaatcaacagcgtcagcgatgcggctgcgttcttcttatcccagtagcggtcgccgcgttcgtctttggtcagctcgctcggtttctttcccgcccccggccagttctccggatcggcttcctcgagcaccacgtcggtgagtttgtcgctcagtgtggtaaggcgtgttttgtaatcctgatgcataaaaaagccccgtagtgaatacagggctatgatggaacagtccagaggtcggaatcccgaccgattaccgcatgccggggtcgacctgatttatcagcggcgcaatccagaaaaggttgttccccggcaacagcgtacgcacgttatgcagcacccgatcaccggcatcgccattaagcacgccagcagtaacatcagtgatggtatcgagcaggccgaacgttgggccaagtgcagagccgataaagccgcgactggcataacgtgactgtgttccggtaccgagcaaggccccaagccccaccataccgccggatgccttttccgccatattgttatattccattagcgggccaagaataccggagcggtcaacaccttccagcaccagcttattcggcgaccagtcgacctctttgccgtttgcggactgtttaagcgcgtacgtcagcgcgccgagcccaatctggaaagccgtaccgtaataaaactgcccggttccctcctgcaggccgcccagcgtggcgcggttataggatgcggtagcgaaggatttaaactggaagatggttttacccagaggtgtactggcccacagcggtgtatcgccgatacccggtgtgataacggtgttgttaacatctttgagcaccgccgactggaagacgccagcaacgtgctgatcgtcccatttttcgaaattaccgatatgccagccgttaatgacttcaccgtgtttctcgaactcgctgcgaatacgcgcggccatgttgtcattgatgccgagcttagccaggcggcggccagcgaacgcgccggagagtatgccgtcggacgtgatcatgccatttaccgatttgttcatatcatcgaagtggcccatcagcgtgagcttgccgaatgcatcggtgacgcgctccatgcccgcttctaccgctgtagttctggcagagccatccaccaggtcccccatcgtacgcgcacgggtatgcaggatggtttccagcccgacggccatttttaactgttcggcccggctggccttgaatgccggtgaccgggtgatcagcgcagagtagccgcgcatggtattgccaaacccgttaaccatcacaccgcgcgcgaggtcaggtattgcggaaaccgtcataccgcccagcttagtgacaaagttagcgctgcgcaggaatgcaccggcgcgtacgaaaaacgacgatggatcgtctggcatgccgtaggtacccgccagacggtcacgcagcgctgtgatgtcgcggatatcgttatcacgggctttcgccagtttcgcctggtctttgggattctggcgcatcagcgcatcgtattcgtcctgaatatccttgagctgcttttccagcgatttgttaccaaatgcgcgcgtcagctccacctctgccgacgcctcgcggatgtgacgctgcagcacataattggcgtcgctctccagataatctttcatcaggcgatcgggaacgctgagcgtacgcgaccgggtgctgcctgccgctttcaccataaagacgtttgcgaaatcctgcggaatttttgcgccgacgattttattgatcgtggcatcagcagtaatttccgcctcttcgcgggacatagttttctcaccgcgcgaccaccagtcgaccagcatgtcgcggaatttatcgcgctcgttaacgatcttgccgactttgtagacgcgcgggaaataactctcctggccgatggcttttagctcctcgtcaggtggcagcaggccaagcttttgctgcgccacttttacccggttaacaacggtgcgcattgcctgcgcagcttcctgcaccaccgggttagcatgcacatcgccgctgcgcatggcgttaccaacttcctcgcggaaccgggaaaagctcaggtcaccgcctgaggctttgtaatggctataggcctgcttgttcgtcaccacgacggcggcctcttcacgacgccaccctcgaacgcgggtttccgccgcgacaggtgtctcgatgccgcgtgcattaccctgtagggtgtagttattctctgccagctcaagcgccgtacggcgggaggttttagacggcgactccatcagacgggtaaacggtgtcagatagctgcctgccttacgtgccagtttgccgaccggaccaccggctgccggagtgagatcctcgagcgtggcttcactgattcgcgccgcgccgacgctgccaccttcgggaagcgaagcagctgccgtgtccgtcgctgacgtgatgctcatgttatcgagtgcgtcagccacttcacgcgtggccgctgtgcgaacagagggtgatagcgcagcacccgccgccgcaaatacaccgctcatcaacgcaccggcggcgacgtgggaggcgctttccccccacgtgcgggttatctgctggttattcaacgcaacctcgctcgctgcggttgcagctgcaccgattgcagcctgtgacgcgatacgggccactgtaccgccctgagcaccgggaataaacatagaagcgacggtgacagggtcaacaaccccggcggcaatgctggcgagaacaccctctcctccggcctcggaaagtacccgtcggtcctcgttttcgtcgtcaatctgctgtttcagccaggcagtttcttctggcgaacgggagtcggcaaaagcagatccccattgttcatagccatgcagctcgtttttatcagcatacggattgtacccgtctaccggctcaaactgtttcgccgggcggaacatctccccaagcaggttattctgacgaaatgcagcgccccacacagacggctcatcctgctggggggccgggttggtaccctcaggcaacgggacatcaaacccggaaggcgccgccaggacattacccgccggagtgaatccgttattcagttcttcaggagtagcgtataccggcattattcagtgctccacgaaaagtaattttttaccctgtccatacgctcgttgtgcaggcgcttatattgttcgtcgagcgcgcggtgtttatctttgaacccgcgaatatcctgaccgcgttccaactcgttgcgatcatgctcttcacgctcctgctgcatttttttgtacggttcccactcttccagtgacggtttccagcgcatcggtctgccgtacgaatcgtagaacggctgtaccgcctcaatgccatccttatcttttatacgcaccatgatggcgtaatcaccattgcgggccgtcagcacatcaggagttatctccagatctccaccaatacgcgactccggcgttttgctggtaacaggtgtagcgctaccggaggtgatcccgagttgcgttgggctggtggagatatcccccttgcgttcgccatacatcaggctctctttttcttctttccactgtgccgcctgccagcctgacggaccgtagttatagagtgcctctggcgcgtatttcataagttttgcgtcgccgttaacttcgctgatactccatgtgcgggcgatctgctggttggtcattttctttgccgcatccgcattaccgccagtggtgcggtagttgatgtcgtacagcgactgataatcattgcgaaaacgtgcggcctccggcgtctgatcgtcggctgatggatttccccagctaaagaagcccgacatgctgctcacagcggaatccatcgctttgctgcggtcttttttgtactccttagtgctctgggttgatgccagttgagctttgagcgcatcggtctggttgtaggtcagattctgcgcctgctcgatagcggtttcggatgccatgccggaatcggtaagctgtttaacggtgagataaaatccctgcatatccttgggcatgtcgccgacagacgcggggtcggtgtcatagaggcgattaaataactcggctccctgacgtactgcctcaggactgcgcgcgcgggaaattgccgataactgggtggttacctgcgaagggatgatcccggtctgagccacctgctgtacgatcccgtcatgggtagtggcgtcgttaatccggaaactttgcgccgttggtgtggcgtcggcggctttttgcatggatttgttcgtggggtcgagtttctcgcccatagacagcgcttcattaaaacgacgggcatcacgctgtgtctgtatcgcttcgttgcttttctgcaccagcgcgccgagcttgccatacgcgtcgagcttgagcgcataatcagggtcgtttgcctggggttttaatttcgcaatttctgactgctgctgttctggcgaaacgtactgtatcgcctggaaggttttggcgttattgatcgcgatatcgagctgcttaaccgccttcgccccctgctcgccgtacgcaaacatgatcgaggctttatctggcatagcgtcaggtacttcgccgttatacagctgcgccatcgtattattcagaatgggatcaatttgctcgcgcagggctgtacgttgctcacggattttagactcggcgatgttatcgattttgttgaccgacaccggaccgagaccggttttatttttacggtaccgggccagccacccgcgagtttccgcaggtagctgccgaacaaaatcagcctcagatatttcgcctttacgtgggtccccggctttcgcgatcatcttgtcaacgttgcccataccccagttgtacgcagcacctgccagcgtttcagagccatatttaccgtaaagctgatttgcgtaatcgcttgcaagcagggcattttgttcttcgtctgccgggttatattcaataccgcgcttcgccgccagttctttgcccgtgtccggcatcagctggtattttccctgcgcaccggctggagaagtgataatactgccgtcggcattaaaatgcttaccgccggattcaactatcccgatggcacgcatatccagcgcaccggtatctttcactggaaaatcgccatttaaccagccctgaggattggtaaccgcataattctgggctctctggtccatagcgcgcaaatttgcctcagaaaccgcctggtcaatttgctcctgtgaccatccttgtgcctggccatacaatgaaatcgagtgctgccgggcgctgcgaatcaacgcagctgcctgcggatcgtcaaacgcccccgcttcctgttcaacggacgattttaccgttgcatcaagttgctggcgctgggcctgttcggtctggctacgttcaaagctgttgtaggtgctggcacggcggatctgacccgctttccattgcgcatcgaaatactgcaactggctctgtggtacgcgtttgcgggcttcttcgtagtctgatgaatccagcttgtccatgtccagaccaacgccagacgacttaaatccctgccgggttaccagcgcgccggtctccgggttctcccagcggtcgctggatttcgcatcgagatcggtaagtatcgcctgggtagcggccacatcagctttatcctgcatacgctgcaaatcatccacagtctggcccagagcagcccccagcccggctacagcgttaccaatctggccaacattactgacaccgacccgggtcggattagtctgcggcgcaacgttaccaaaattacccgttggaattctcacggttatttactccctgcttttttccagccgttatacgctgtgccgccagcgctcagcagtgagctgcccgcgctgatgtagccagatgctgaagcattacggccgctgatgcggtcggcagacgcctgcgcgttgagccgtgcgctctggttcgcgccgttcagaatggtctggtacgcatcctgttccgcatcacccacaatatcggactgaatacgcagcgcagtaccctccccggtttcaacacctgatgctgccagagctgcatttgcctgggctgcttgtgccctgcccgccttacggatacgatcagcttctacgcgtgcagctgcctgcgcggcttctgcatctgcttccgcctgcgccgcctgatagttggacattttcttttgctgttgcccgctatagaccgcgccaccagccgcaagaacagacgcaccaattgcagccacctctaacccggtacacatcgttacacctcttttgaataaagcagaccggtacgggacaggccgagacgtgaatacaaatcaccggtgcgctcttcatgcacgcccgtggtgatacccatatttatgatggcggcgccgtggtcttcagcccaggtgataaatgctttagcgagacgcggtccagctgtgccgccacgatgttcctgcgcaataaacagcccatactcaaacgccatcaactggcggctgaaccactgctcagcaataccaccggccagccagccgattaccgcaccgtctttttctgccacaagcagacagccggcaggagttgaaataaggttgcgggcgagctctgcgcacttttcttcatcaaaaggtgagttctgcgaatagcgggactcgatatacatccgcgcgcccagctcgatcagcgccgggatatccccgactgttgcgttacgtaccatgtcagcccccgttactggtgaacgtgaaaataattgcgagaaggtggaatggcagcggctggcgctgctgaataagcagggtgtcctccccccgctcccagccgagttttccccagtagtgatccccggtgaaaagcggtgcgggctggttgaggatttttggtccgaaccggcggaacggaatgacctggccgttacactccgcgccagtggtttcgagaaaacgcattgtcacttcgctggtgcgcttcttcgcgttctgcgttgtaccctcagtggtctgaacctctggcgaaagcgtttcgatcgtgctttcgaagtgcaggccgatctccacacttttcgccgggcgggacagggtgatttgaccagcggaaactgtgtactgcggcataacagcgccatcggccaccacatcaaccgtctgtccctcaaggtgagcgaggccggaccacgtggcggaaccagcgctactggtgcccgtcacagcggcatcggtatacagtttgctgtcgaatacctcgacataccggacagtctgaccgtttatctcacgacggacgattgcgtaaaccacatcgtcggtatctgacgggatggtagccaccgactcaaacgcgccagcagtcacctgacgggaccatgcaataacgtcctgagcgcgatcgatagccatggtgaccgcaacaccatccgctctgaccatccagataaatgcatctggttgttgctgataggccatgtccagcacgccaccggcagtgatgtgctcggccagcaccgtcatatcgttggcggaataggaaacaaagctgtccgggtcatacgccactgcgtagagcttgcggccagcgcgctgcacgaacatgatttcggtaccgactcgcaccgggcggatcccgttacagccgtatggactcggatttttcaccgaaatattggtcggtgttatggccgcatcgtttccggaggtgattgtaaactcgccgccgtaggtcagtgcaatcagggtgttcatctgcgccagatgcacgatagggttgagctggtcggaagacagcgtgaagctgatcgcgtcgtcgtcttcggtgccaatctcaaacgacagataaacgcccgtttcactccaccagattgtttgcggatactttggcgaacccgccagaacaaggcgctgctggtacagcgtaactgcaccgggatagccaaactcatttgtccagaccgagtcctcgcgcgtccacgaaccgggtgacgctgcctgtgttgcgcttaaatcgctgcgaatggtaccgacagcaacctgcgcactggtaatgctttttatcagcaccagcccttcgttaatccggacgtaagaaccgacatcctgagcaacccatccagccccggtaaacggtggtgtttcgttatcgccaggatccgcatcgctcagggtcagcgtaatttcagagcccacgaactctttgacggatggcttacaccatttctgcggtgtatcgcgtacctcgtcgaaaggctcaacgatgaacggtgcaggctcaagcacccagtcggtctggccgcgtcgctggagacggtgaggcttcacagactgatgaaccagaaacatggtgtcagcgccctggacgtaattcacggcgggcagcatgtcagcggtatagggactggcgatttcataaggcgtattgtcttcgttgaccagttgcttaccgttctgaaaaatgcgcatgtagccgtcaccgaactccagcatgtaagcctgagatcggttgaacacgtaggggatgagtcgagattttttatcgccgtgtttggtcgccgccgcaaagcgtgtaccaggtctgcggacaacgccgccctgcacgaccacaacagcgttttcgataatcttcgcgccgttggcataacgggcgatatcaacgcgccccatgagacgcggagacacttcgccagcggtaaaattggtttttatgaggttcgcgcgcatgtcagaacctcgactcataggtagggtaaccgccaagctcttccggcggttcttcctgaccatcaacggctttagcctgtttaagcaggaatgcggcctcctgcgccagactatcgcgcagactggcggatcccgtcaccgcatatgccagtttggactgcatcatcatttcggcaacgtccaccagcgcggcatcccatgtggattcgtcctcattgcggtagatataacgcaggcgaatcacatcgacgttggacagtaaccgggtgccctcaatccggtaatcaatatcatcccgtggttcaccgaccgacagaacgcggatcaggtcaccgggcagggaaaactgatacccgtagccaaagacaggcgcagcgctgacaggggaaagcacaacacgtttaattgcgcagttccacgggtgagcacgaagtaatttattgcggacggtagggtagaggttggcgcaaagacgggcatgatccgtgtcttcgtcgaaatcatttatcgggtgagcacccagcgccagaagtgcatttgaacagatagagacactcgaagtcatggcagaacctcagatgaaaaaaggccgggggtataccccggcaaacacaccagcggcttaaacaacaaaatcgatggcgacgacttttttctcgttggcgcggccagcaccataagacgcatcaacagagatctgaatggtgttgtttttatcgcgacgtggaccgatatcgacgttgtactcagcgccggtaccgaaatgcacggcagacttacaccacgcggctgcggttttggtggtgacagccggatcgccatcggtcacagaatccagtttttcatatgccagccagttaaagccgagccatttggaggaaaccgcaccttcctgcagcatcttcactgccatgaaatcggcagaggtcagcgtggtgtcgctgaggatctgcgtcagcatgtcggcgttgtacgtcatatacagctcttccccgttctgctcgtcacactcgttacggcggaacatcgcttttgcggcgatcagcttggctttggtcatccctgtaccaccagcaacgattttttgcgacgcaggcagcgccactggcgcatatgccccgccgctggacgttttacgcagaacggtatcgagcagcgcacgataaacaacatcgtcttttttgcggttggcggccgccagggtgagctgcaggtatggtccctgcgggtcggccagcaatttacgcaagtcgcgtttttcaacagggacaaatacaccgtagtccgccatcaacgcattacgggtgccagcttctggcaggtcccatacggtgtcaccgaaacgcgtggtgatctgcgtcatttcgatggtgcccatatcgttgatggtgaacgcttcgccggtgatcatcccacggtcgtttaccgctgcctgcaggcgggaatctttctgctgcgcggcgatttcgaaagaatcatgaaactgcgtgataaacgcagcggtgatcatgttcttgttggtatcaaatgacataacaatcactccagaaaatatcgcctgctgggttgtcggttgcccggcccgattaacacaatgcgcgtggcgcttacgcactgcgggaaaattcagttatccggcgtccccgccgggctggttgtggggagattgttagcgagatgtacggtcggaatcccgaccaaatgaaaaagccagcgggttaggctggcttttgatgctgaaattgtgacatgtcacgctacggtttgatcgccgtaacgcttctggtaatacgctttgaccgtcgcggatacgcgttcgtggtcggcgtgtttcgggtccatgtacgccggggatttcatcagatcgcgaatggtctgctgctcttcgaggttcacatcgccgcccgccggcgcgtcctcctgcatttccgcaccgacttttgccagcatgcggataaccatcgggttattgccgatctcgtcaatacggcccttgtcagcgtcgtcagccagcgaattgaacgcgcggaaagccagaccgatattttgcttaaactccgcgtcggttttccatacctcgcgcagctgcgtggtggcagactgtgaatctagctcagcggcaccgcctaccagctcaggagcacgctgtgcgtattcacctaggataaagctcatctggtcgttggtgatgcctttggcgtgcgcagttttcataaagctctgcatgcgcgggtcggctttgaactcttcccagttaaacccctcaacctctaccttaggtgcatactcatctgacgttttcggcggtgcgtcgccgctgcccatgcgtttttcaaggtgagtgtaattttccgccagtttgcgggcagagctttcaatactgagttttccgtcttcgcccataacgcggaatttctcaggtatccagtcattcgcaccctgttcgcccgcgccggtgctgagcagagaattgccagaaggttcaccagcacccggattattgccgccatcttcaccacctccgttaccgccgcccggctgttctgcaccctgctctgcgttcatgaataagtgtttaagcttccacatcgtcttctactccatcggccttgttaatttcacgcaggatgtaatccagtacggatcgctgccctgccctgtaacacgtttcgcggtcgccttcggtaccaccggggacatacgcagcgcgcccgaagcggcgcgttaattcttccagcacctgagaaccgccaggcatttcttcgaaaatgcgcttaaagtcctgaggcgtagcctgttttattctcattggttacctgccagtctttgccctattgccgcgccagctgtctgccctgcggccccaactgcctcggtgcccgcctgcatcatgagctgctgctgtgcggcctgctgctgtgctttctggcgctggtcgcggagatccgccacagcatcggatgagcgaataaccttggccgggacgcccagcgcatcggccacaacgcgcgtggcctcgtcggtatcgatgaggtcaacaacgtcctggctgatgcctgccaggtttgccacgttcgcgccgaggcgttcgattgccgttacgtcttctagcttctgggcgcgtgccagaggtgagatgtaacgcacgttgaaattggcgttctggaggctctcaggcggtggggagaagatgccagcgcggaaagcgatgccaaagcagcgcaccaccagcaactggagatattcagcctggaaccgcccatacaccgggccgagcaactggcgaatcagagcaacgcgcacgtgcacctcggtggcggtcatggctggaccgtcctgcggttgcaactggtcagccatcatgattttgcggattgatgcctgtagacgctcttcagcagtgaatgccacgctgaaatctgagccggtcagcaagggtttcatgctgtcgacgctgttcgccacgatgatgcgacgcgggcctaccttgaccgtacgcgggttgagtacaccgtcgtcttcggcaatccacatgccagagatagccagatcctgcgcagctttctccatacgtttggtttcgttcagctctttgcagtccggcagtgcgtcgtataccggtccgatgccgtaggagccgccggggattttcatccagcgcggaacgcagcacgggaattcgtgatagccggattcgcgcacgatctgcttgttgctcacatcgacgttgtacgacgcaaagcgcatgtttttcgccaggcgcgcatccaccatgtaggtttcgcgcgggaaaatgcagtgcaggaaatcgaatttatcgtcggcctttttcttcgccgcgtcgcggatcttctcgctgaccttgtccgcgccgaattctttgatggcctgctctgcggtcagctggtagcggcggtatatcgtgtccacgatgccgtctttgcgggtggacgtgacatagcactgcgccagcggccactgctggaaggtatagccgccctcttcccggtcctcgtcgatgtacaggacgaaccagccggcgcacaccacatcgagattagcctcgtagccctctgcatcgaagttggccgcatggatattttcccagaccagcgttgcgcactcagatagccaggctttggcgtcgtcaggcagcgattcgctgtcgaggttcagccactgcgcgtttgccggggtcatgccggacatgagcgcagaggccagcatgcgggcgctgtcggtggcggtgccgtccagtagcttcgccaccttgtgttttgcgctctgagcatcgagcacttcgtcagagaatcccgcgccgcgcagcggataggtgtagtcatagcactcgcgccagacgctttcatgctgctggcggttggctttcagcgtgtcggaacgcttaatcagcttaacggcgagttcatccatcagttacgcccccagagtgtttttctgctgcgctgcctgcgcaccagaggacagcagagagctgccagaatcagccgccccctctgcgccactggcgagaagggacgagcctttcttgcgcttcttgcgcgctgctgcatctgcgtttgccgcttttgccgctgcgtcggcagctgcatccgcttcggcctgcgggtcggtctgtacgaccttaggtgctccacctccacacatagcgatcccctcttagcccggaacgtgccagccgtgctcagtcagaacgggcttacccgtaaccggctggcgcttgccctcatcgttcgtcacgtagcccagcggcgcggcaggctctgccgtggtggcttttttgacgagctggaggaattcaagattgtcggtcaactgctggtcagccaggtctgtgtaacccagcgtttcaaagcgggcgatgatggccgcgccctgctcgttgatggtacccagcagagtatttcgctcagcgagtacggcatcttccagcaggttagcaacacgctgctggataacttcctgctctgcgcgctggccgtctgcgttgagcgtctggatctcagtcgcggtaaggcggttctctgcgtccgtctgctgctcagtgccggtttcaggctcctgccctggtacttcgacggttttctttggtcggcccattgtgttggctcctgtgatgattgagccgtaagtgtgaaacggggtggcggtcgggatcccgaccaaatgggaaatttgttaaaaacagggccgatttaacataacgaccgttacgcgcaccgtcaaaagtggactcattacgttaaatgcgtgaagcggttatttgttgcggtttaatgtggggaagtggtgaaaatggactgcataaatcgtgcataaaacagggcggtttttgcatagcgtttttaaccgatgaacgccctgtttttgcaagttttcatggtgccagacgcttcgatcgccaggcgtaaacaaatcgccgtgatgtgacctgtgctggtagttcggaacgcgggcgctgcgtgacataacaccagaagtctatcagcgcttcgcccgtgtgatggttcggtgcggcgccttgcttccagccgatgatagcagacttcgacacgtcgagctctctggcaatctcctggaggggaatgccgctgcgcgtgatgtcgttaatcacccggaaccagtctgttttgaacgttgcgacaactggcataggtcatcccccaaaacgcgcgcacgcgcgagcatagagagcgattttattgagcttctggcgctcgttaatcgccgtgatggaatcaaatcgtatttgcatatcgctactcgcaataaattacatgttcagggtggaaccacctgcccccacctggaaccacctttttctaacctttccccaaatagacttatatatatatatggggttgttagtaataaggtggttccagtggttccagtggttccgagccgctggccgcaagggtcagaaagtggaaccacctccgttattaggtggttccaggtggttccagaggttcccaaactttgcttttcttaccgtcaattcgcctttgggcacgcttatatccgcaattttgcaaaacattactaattcgcatttcttcacgttttccgatgtggcttggatttaagccaatcgcatcgcgcagaacgtcgctagcgcgtaaaaattcgcaatttcgcggaatgtcgttagtcatcaggtcgggcgtgtcgagccatttctcgaccgtttcgagccacgcatccttaatggtgtactgctcatggacactcgcaccgagccgttcagcatcgcggaactggataccgccgaggcgcttaaacgtctcgcgggcctcagcccagagcaaaagcaggtcggtttttatcgctttcacgtcgactttcgacacctccacggggagccagcgacggttaccggtcttgtcagcgaggaattcgtcctcgttggtggtaccgacgaacaccagacgacgtgggaactgagtagcgaattcacgatatttagggatccagttctcatgcgtgcgcgtcacgaatgccttgatggattccagctctttggtattgagtccgcgcagttcgccaatctccgccaccagacgcccgcgcatcttgcgtgcgaggtcgtcatctttctctgcgaatgagatctcagtgaagaacgccgggtcggggctcagcgcttccacaccggaggacttcccgcagccctgcgggccgacgaggattggcaccatatcggctttaacgccaggctcaagcaccctgcccgccagcgccgtccacatgtacatggacaccgcgcgggtgtatggcgtgtcggcggtaccgaagtgcgtatggtagaaagtttcgatgcgcggcacgccgtcccactccagcccgttaagccaggtagtcgctgagtcaaacggctgttcatcagcggccagcagcaccacgtcacggatgagctctcgtccgacaggtttaaagccgcgcttttccatcgtgatgcgcaggcgcgcataatccgcatcggtgaacgcctgccactggccggagcctgccggggcaaacatgatttcatcacggaactggtcgaagcgaatatcgatgtccacgaagtcaggacgcactaccgctttggccgcgttgctgatggtggcctcgatgcggccccatttgtcacgctcgaacgccggcagcggtaatggctcggccacttcggtgctggtcaagtcttcgaaatcgtcgttgcggatcccgatggcattaagaaaatcgccgtcgtcgcggtgcgcgcagctggcgtgcaggcacttaaaatggccctgctcaaagcccgcggtaccgcccgggaagtaaaccgtactggtaggatcgccgccggtgctgtgaccgtcctcaaacgggcagcggatgtatcgctcgccgttcgtgccgtccagcagtgtccagccattggcgtcgaggtattccgccgtttcatccgtggctccgggcgtgaacgttgagcggtcgcgcatcttcgtgctgcccgcttcggtggtgaccgacacaggcagctgttccgccaggcgctgccacaacgtttcgagctggtcagccgttatgactgggggctcgtccggcagaccgccgtcccactcaatacgtgcgccgctgctgtgcgtaccgcaggcaacgaactgttgcccgttcgccagcagttcgataatgcccatgtcgcccgccaggcggtggatgcgcttacggaaatcgccttctacggccagcaggtacaggcatttgttgctgttggcgcgccagcgacgcggcggcagctcgcccagcagctgcaccagcgttttgcgaatatcggcctggatatcttcgtcttcgctgtcacagtccagcgccagccagccatgacctgtacgcacgcagatgccgtaatccggttctttcgaccagcgggcaaaatcatgctcagtaacgacgtgctctgtccactgagcaatgccggtgaccagacggtcacggttatagcggctcggcgttttgcccagcgctttcagtttactgtcgggggaaatggcggcgcccgggttgcacacgaccggcagcagctggtcagtacgtcccagcaccagatcgaagtggaaccattcgtcaggcgttgccccccagatctttttctctggcatgggttacgcctttttctcgttttgtgagccgtgcaacagccagttggggtcgcaatcaagcgcaacggataattcaagaagatagcgaggacgggagattacaccgctttcaatcctattaatggcctgctgactaacccctgttagctcagccagcgtgacctgcgtcattttgagctctttacgtcgctcttttaatcgggtagccagagtcatagttatcacctcatacaattttagtggtatttagcaacaacaaatgatgtttgtcaattacaacaaaaattgtatttaatacaggaacgattaataaccaagccctaaaaggattatcacatgtctctcgcagcccgttttaaagcacgccgtttggaattaggaatgacccaggtggaggtcgcgaactctgcgggagttagtcagcagtccattgaatccattgaaagcggacgcacccgaaagcctcgtaaccttctcgacctggctaaggctttgaagtgcagcccagactggcttttgaatggcaaaaatattatgcccctggcagagataagcacccgccgcatcccggtacttagctatgtccaggccggtgaactcacagaagcaaaagatgtaacagaccttactggtgatttcgaatacgttctggcagattcggatgtcccggcaacatgctttgcattgcgcatagatggcgacagcatgcagcctgaatttaaggaaggggatatcgttatcatcgacccggatctatgccctgctccaggggaatttgtggttgccaagaatggcggccatgaagctactttcaaaaaatatcgtccgttaggggttggcattaacgactttgaattggttccactcaaccccgactatccggttttgcgcagtgctgacatgaagttgcaaatcatcggggtgatgattgaacaccgtatataccgccgtaaacgctaacaatcctgccttatctggagggcccaacggctctcccctaccttacttgtaaaatcttaccaactaaattcatttaaatatcaataacgtggtatttttccaccacaaaataccacacttgtggtttacacaatacaactcaaattgtagatttaaccacaagtcgaacggcgcgactctaaaccatgcgtcgggaccgtggcgggacaggatgtcggcaatacgggtcagtaagttccctttggggtgcggtgaattgcagtccactgagacaagccgaagatcagcaccggccaccgcaccgccaaagtgaacttaatgaggaaacgacgtgaaaacgtataaaccgctcaaaggtgaatgtcctgtttgcgaaacaccgcttcaggcaacaaaaccggaacgttacaaaattaatgaatgctacgagcgctgccataaatgcaacgctttcctgcatgtcattgcaacgcattggcgagtccgcttcaacctcgcagtgccacgttaaccaccaccccgtgaatcatccattgctgtgtgtagtctttgcccgcctcccatgacgggcttttttatgcctgaaagcgcattcaatgcagtgcgctccccgacatgaaaaggagcactaccgatgaaacctgaacacctccaccggctgacggggcgcgacgtgttccattatcgccgcaaacatttcgatttaattaccggtctggccctcgctactgcgttcgggctggctattaccttcattctccttgtagcgaggaccgcagtatgagcttagaaaccagtctcgaacttaacaaccagctgctgacgcagcataacgccctgcttgaacgccttatcactgcgctcgcctctggcgtacctctccgcgcggacaccgtggcgcaggtgcaggaatatcgcgaaacggtaccagaaaccaaagcggaaaatactgttatccgcaaggttacgctggacgatctggagttcagcgacattatcgccctagctgctttctaccctaagccgcaggagctcagcgaaacgatggtccagcgtgttgtcgattaccgcgacgccgaaggcgataagcgcgttgtgcaaatcgacgctctggacagcgccctacagggcgtaaaacgtgcaggtcatctgaacaagccagcgttacttgacctgtcgcgtaacatcctgcgcttctgggacgatttgccaaccatcgcagcacgccgtgactttgccgagcgtttactggacgcacccgccgacgggcgccatgaagtgaagccaaaatccagcggtaaggatgaagagcgcaccgggccgttctactgcaagaacgtcgatggctccgccgccagcgagctccatacattacgcaagctgaatgatctgcttaaaaaggggcatatcgagatcagtaaagttgagtacctccagctgcaggaagatttcgcacgcaaaaacgcggcaaaaggcggtaccgaaacagctggcgatgccggggaagatactggcgaacagaccgattttgcggcactgcgtaaacaggccgaagggatgatcctccagctggcgaaaggtggttaccgtgccgaagcggtggcgattctggaaaaacagggtgccaaaaaactcggcgaagttgctgacgagaacctcgcagacgtgatcgctcaggctgaaaaagcgctggagggttaattatgccagacgttcatgcacgactttccccctcttcagcgcatcggtggatgcgctgccccggtagcctggcgctggaggccacgcaaccggataaaagctcctcattcgcagaagaaggtaccgcagcgcatgcgcttgccgaaaaggtgctgcgaaaccgccagagctacccggagcattatgtgggttgcaatgtcgcgatgttcctcggctcctacccccttgctgagcacccggatgatacttccggcccgcaggtggatgaggaaatggtcgaagccgttggccgctatgtcgatacggtctgggcgctgtcgcagggcaacgagttgctggtcgaacagcgtgtcgacttctctcacattgtgggggttgaagaatcattcggtaccgccgacggcgtaatcatcgcgggcaacgagctgcagatccacgacctgaaatacggtaagggtgtgcgcgtcgatgctgagcagaacgagcagctgcagctgtatgccctgggcgcgctcgaacagttcagcatgctgtatgacttcgagacggtgcgcctgttcatccaccagccgcggcttaaccacgtttcggaatgggcgctgacggttgaagaactccaggcgttcggcgaacgggcacagggagcggccgccagtgtgatcgtgatgttcaacatcgcggactgcgaaggcgtcgaaaccctgccgctggaaaacttcacaccgggcgaaaaacaatgccggttctgcaaagccagcgctatttgtaccgcgaggcagcagttgcacttcgacactatcgctggcgatttcgtcgacctgacacaacctactggtgagcagctggcggaagcggttaagtgtgtgccactgctgaccgccgaacagctggcagaggtatacagtcaggccgattttatcgaatcgtggctaaaggctgtgcgcgaccgggtgaacagtgagctgaacgccgggcatccggtaccgggctttaagctggttactggcaaacagggtaatcgtgcctggagcgatgaagaagccgcccgcgcgctgctgaaagaccagttccgatataaaactgaggaggttttcgaccttaagctgattagcccaaccaaagccgagaagctcatcaaaaaggccagccctcgccgctggacgaaagtcgaagcgctgatcacccgcgctgacggtaagcctaccgtcgcccccgagtccgacccgcgccccgcgctcaatctcaaccctgttaacgatttcgacgacgtgtccgacgacgcgctcgccgcagacctcatctgataaggaacgactccatgaaaattaaactgaacaacgtccgcctggcctttcctgctctgttcgaagcaaaaactgttaacggtgaaggcgacccgcgcttctcagctgttttcctgatggatccgaaacacccgcagctggaagaagtccgtaaggcgctgaaacaggtagcgaaggaaaaatggggagagaagtgggaaaccatttacggccagctggagaaaaagctcaacctctgtctgcacgacggtgacgaaaaagccgaatacgaaggcttcccgggcaacttcttcctgaatgctgccaacaaagcgcgcccggcggtcattgaccgcgaccgtaccccgctaatccaggctgacggccgtccttacgccggttgctacgtcaatgcggtgatcgacatttgggcgcaggacaacaacttcggcaaacgtgtcaacgcatcgctgggaggcgtccagttcctgcgcgacggtgacgcattcgctggtggcggtgtggccgcgccggatgacttcgacgatatcagcgaaggcgcagacgccgacgcgctgatttaaaactaaaacttacgcctcctgtttcgtgggaggcgtggttaaatccgaagttataacgtcgagtttttggcgttttattctgtcaacttcatagttatagctatcctccatttcttttttaatttcatcagcaatttttaattcgaccttaaagtatttttcagcccaaacaagccaattaattctatttttaattttcacattaagatgtctataaatctttattgactcctcccgctgattttgaaacttaagaaacttctccagagatacaggtatacctttgatagaacaaatttctacaccatctttttttgcatatgaccagtgagtgctatataccgtatcaatcattgccaaagctcgctgacaatccgctaccatggtccaaaatttggcattaacaattttcttttcaatcgtaattagtattaggtggtctcggatgactaatgccaaaggcataagtatatacacacctaaaaatcctaaagcggccatgagaattgtagaaaaggatattgttaattccattgaataactcctaaggttagatatgaataatatactatggggcgacctggaaacctattgcgaaatacccattacaaacggcacgcatgcttatgcagaaggtgtcgaggtgatgctcttcgcctgggccatcggcgacgagccggttagcgtctgggatctgactgctggcgaacctatccccggcaggcttcagaaggctatcgccgaccccgataccctgctttatttccacaattcgcacttcgaccgcacggtactgcgccatgcgataccgcgtctggcccccgatgtaacgcgctggcgcgacacaatggtgcaggcgctggcgcacggcctccccggcgcgctgggtgcactctgcgaggtgctcggcgtcccgcaggacaaggcgaaggacaaagaaggtaaagcgctgatccagctgttctgtaagccacgtccgaagaacagcaaactgcgccgtgccaccagcaaaacccacccggaagaatggcggcgctttgttgcttacgccgggctggatattgaggctatgcgcgaagtacataagcgcctgccgaagtggaattataagggtacagagttggcgctgtggcatcgtgaccagcagatcaacgaccgcggcgtctgcatggatgtgcagctcgcgcaggcagcgatcgaggcagtagaccaggagcaaaaacgcctggcgaaacgcacgcaggtgatgaccgacggcgaagtgcaggcggccacgcagcgcgatgcgctgattaagcacattgttgaatcgtacggtgtggagctgccggacatgcagcgcagcacgctggagcgccgtatggcggatcctgatttgccgtcggcagtgaaagagctgctggctatccgcctgcaggccagcaccaccagcaccagcaagtacaaatcactaatgaagggtgtgagcagcgacgggcgtctgcgcggcacgctgcaattttgcggcgcatcgcgaaccgggcgctgggccgggcggctgttccagccccagaacctgccccgcccttcacttgagcaggatcagatagacgagggcatcgaggcgctgaaagccggatgcgccgatctgctgttcgataacatcatggagctgaccagctcagcgctgcgcggctgcatcatggcaccggaaggcaaaaagctggtggttagcgacctgtcgaatattgaagggcgaaaacttgcctggcttgccggcgagcagtggaagctgcacgcattcagggagtatgacgaggggaccgggccggacttgtataagctggcctatgcccgcgccttcaatatctcgccggacgatgttgataaataccagcgtcagatcggcaaggtgatggagctgggcctcggctttggcggtggcgttgcggcgtttcttaccttcgctttggtctacggccttgacctcgacgaactggcgaacgccgcactgccgaacattcctcgcgatgttatccgcgaagcgaaaaactggtacgacgaatccgttaaacgtaaggcgacctacggcctgtcagagcgcgtattcattgcctgtgactcgcttaaacgcctgtggcgcagagcgcatcccgcaacctgcgatttctggtacgagctcgagcgcaccgtccgcgcggcaatagccacaccgacaaaagacgctgtactgcggctatctgaaagtccgccgcgatggtgcatggctgcgcatccagctgccgtccgggcgcgcactctgctacccgtccccgtctatcgagaaggggaatatcacctatcagggcgttaactcctactcgcgcaaatggcagcggctcaaaacctacggaggaaagctggtggaaaacgtcacccaggcggctgcccgcgacgttctggccggaaacatgccgctgatcgaggatgccggttacagcattgtgctgaccgtacacgatgaggtaatcaccgaagcgccggacactgacgatttcaacgatatagcgctttccgcgctgctctccactaaccccaaatgggcgcccgatatcccgctgaacgctggcggcttcgaggcatatcactaccgtaaggactgatccaatacttgtaattgatagcgcataattgcattttagatgtagttatgttgctcatatcaaaaaggaaagggtatgtctgaaaatattcacattgtttctctgtatgaaggcgatacatgcccgcatacgggtatatggaccgtaggagaaaatccgcattttgtttctaaggaagtattcgaaactcaactgtgcgctgtaataaatgaaggggatttagccccaaaggtacctttcaattttccctactgggtattccacaaggatctgtagcttcctgacagtaacatcccaacccaaatatctcctcaatcaatgcccctaaccctaggggcattttttttaaggtaaccccgatgtcattcgaaaaacacgacagcccgttgtacttccggtctgcgcgggaggctatgcgccttgagcaggcgggagagtatgaccgggcggcgaaggtatgggccaaagcctcccgcgaatcccgcaacccggttaaccagcagtggagcgataaccgctctgatttctgcatcatgcagaacatccgcagcaaacgtaaggaggtgggcgatgcctaacatcgacaataaagggtggggttttcccgccctgtcaaaaaaagcgcacttctttaatgcgggtgaagccatatcgctatgtggtaaatggatgttcacaggcatcaggattgatgaatggcatgaacaccctgagaactgcgctacctgcttgaagaaacgcaaaaagcaggaaggtgaataataatggcctacgaacgtgaaagccttatcgaaaagcatctcgtcgccgaagtgaaaaaggcgggcggggtagcttataagttcgtctcgcccggccgccgctcggtaccggatcgcattgtcctgctacccggcggccgtctcgttttcgttgaatgcaaagcacccggtaaaccaccacgcgccgaccaactgcgcgagcacgaacggctgcgcgcgttgggctttaccgtggtggtgctggatagcaaaaatctgggggaaataattactttttaggcttattaaatgagcaatgcgcaaataggttggctttaatattacttgctaactctacagcttcatccaaaacaattgttgaatcggttaccacttcacccatgtcattttttaaaggaaattcatgaagtctatcacgataggtaagtagctttttaaaatccttaatcaggttatcatccttaaaaacgccaagtaaagcattgtactttgcaagttccaagcgatgagtgccgaataagtcattgctactaacagatacgccgttccctatagcgtatatacgctgtatatagtcggtttcggtatcaatatattttaacaaatcagctaaaacgtgatccgtaaataatttcacctctgttttttgtttctctaactgcatcgcgttcttgtgttgccaacgctgggtaaaatatgacgttgctaatccaagaattgcacctattgcgataccaattaggcctattatcggggcacttaacccagtattagtcattttctcacaatatacagtaagcatccgtaacctcttcttattattactctttgcaggttaccatcttaatcttattaaagatttttcccaataactaacttcgtaaacttttctagtgacggtaagaggaactctatgacctcatctaaaatctttatctcccgtccctaccaaaacctgatcatcaatcacgaactagacacactgcgctgcaacatctgggcgggcatgggtatgggtaaaaccgtggcgacgctcaccacgctggaagatctcttcatggcaggagcagaaacacagcccgcgctggttctcgcaccgctgcgcgttgcggccagcacttggccggatgaagcagttaagtgggggcatctgcgcaatatcgaggtacagccgattgtcggtaattccaaagcgcgcgccgctgcgctggctaacagcaacgccagcgtgttcaccataaattacgacaatctggtctggctggtggaagagctgggcggccgctggccgttcggtacagttatccccgacgaaagcacccggctgaaatccttccggttgcgtggaggtggtaagcgcgccgcagcgctgggcaaggtggcacataagcacgtccggcgctggatgaatctcaccggtacgccagcgccgaacggtctggtggatttgtgggggcaagcgtggtttgtggatcagggccagcgactcgggcgcacgtacggtgctttcacctcccgctggtttaactcaatacagtttccggggcagagctggacgaagctggagccgttcgcacactcgcaggacgaaatacagcgtgcactggccgacgtaactatctccctagacgccgccgactggttcgatatcaaagagcccatccataacgtgatccgcgtggacatgccgcctaaggcccgccagcactatcgcgaaatggaaaaggaaatgttccttgagctgaacggcaaaggcatcgaagcgccgaacgccgcagcgaaaacggtgaagtgtctgcaaattgccagcggcgcggtgtacaccgacgacgccggaagctggtcagaactgcacgacgcgaagctccaggcgctggacagcattctcaccgaagcggctggcgcgccagtgctggtggcctaccactggaaacacgaccttgagcggctacgcaaggcgtttccgaaaggtcgccacctcgaccaggacccacagacccttcgcgactggaacgccggaaagataccggtcctgttcgcgcatccggccagcgcaggccacggcctgaacatgcaggacggcggcaacatactggtgtttttctcgcactggtgggacctggagcagtaccagcaaataattgaacgcatcggaccaacccgccagattcaggccggacacaaccgcccggtgtttattcaccacattatcgccaccggcactatggatgaaatggtgatggagcggcgcaactcaaaacgaaaagtgcaggacatcctgctcgatgccatgaaaaagagaggtatagcatgacaccggttatctctgacactgacctgattaacatcaaagaggttgagcgctctgttggcctgaaaaaatccagcatttatgagcgcatcagtaataacgagtttccgaagcctaagaagctcgggagccgaacctcccgctgggtacgcggcgaggttgaagagtggaaaaaacagtttctttaaatcaaacgcagctggtcaatataatccgcataccactgcatcatctcccgacgcccttccatatacagggcatggttataaaccccgcgtatattgttcttgtccacgtgagcgatctggagttcaacccagtcagagttgaatcctttatcgttcaggatagtgctgaatgtatgccggaagccatgccctactaccctccccttatatcccagcgtgtggatcatccggtttattgtgttctcgctcatgacctttgacgggtcattcctgccggggaacatattcacgtatcgacctgtcagtccgtgcagttcttttagcaagacgacaagctgctcggaaagtggtaccaggtgcgggcggtccgtcttcataaattcggcgggtatctcccacagctgattatcgaaatctacccattcccattttgaatgccgcagttcgtaagtacgcagccctgccagcatcatgatctgcaaccccagccggggcagcgggctccccttgtaactctcaagcgccgcgagaaaatcaggcagttcttccgccgtaaggaacgggaaggactctcctttatgcccggtcattgcgctgttcagttcgctgacggggttatacttcgcgcgcccggtcgcaacggcataactgaacacctcaccgcaccaccggcgtgttttggcagctttctcggttgcgccgcgattctcaattttgcgcaatgccgtcagcatctggacaggctcgatttcagcaactggcagcttacccaccgcagggaaaatatctttgttgaatgcttcgagaatgtcagaggcatagccaggcgaccagcgcggctttttgaattcgtgccactctgtggcaatctctttaaacgtgatcgtctttgctgccgcagctgcaacatggcttttggccttcacagggtcaacaccagccgcaacgttacgccgggcctcatctcgcttttcccgagcggccgccagcgaaacagccgggtacacaccgagcgccagcatcttttctttaccggcgaaggtatagcgatagcgccagtattttgccccactggtttttaccagcaaaataagcccgttgccgtctggcagcttatagtctttctcggcaggctttgccgtctcgacctgtcgcgcgtttagtttcataggtacccgcctcaaactcagatacccgattatgtacccgttttaaatttggattgcaacggcaaaaggcggataacggcggacaaacaaaacagccaaatccgcgaaaaacaaggaaaaatggatggttgaggatgatactggatgaaatgatggtgccgataataggagtcgaacctacgaccttcgcattacgaatgcgctgctctaccaactgagctatatcggccctgaaaggccggttacgagcgtaaccacggggcaaaagagtagatctaaccgggtgatgcgtcaatgcccttttgaatcaaacggctatttttgcatcacccgcgattatttacccacgaatcgtatcatcaccgtagccgatccacttgtaggtggtcagcgcttccagccccatcggaccgcgggcatgcagcttctgagtgctcacagccacctccgcgcccagaccaaactggccgccatcggtgaagcgcgtcgaggcattcacgtaaaccgcagacgaatccacttcattcacaaaccgatcggcattgcgcagggtgcgcgtcaggatcgcgtcagaatgctgggttccgtgttcacgaatgtgcgcaatagcgtcatcgagatccgcaactaccttcacgttcagatccagcgacaaatactcatcgtcgtactgctccgcgttaaccggaacgaccttcgccggaccgtctttcagcagggcgagagcgctctcgtccgcatgcagcgtgacgccactttccgccatctgcttgctcagcgctggcaggaaggtactggcgatgccctgatgcaccagcagcgtttccaccgtattacaggtgcttggacgctgcgttttagcgttgacgataatcttcagcgcaggttctacctccgcggtgtcatccactacgatatggcatacgccaataccaccggtgatcaccggaatggtagattgctcacggcacagcttgtgcaagcccgcgccgccgcgtgggatcagcatgtcgatgtatttgtccatgcgcagcatctcgttgaccagcgcacggtcggggctttcaatcgcctgcacggcacccgccggtaaaccacactcttccagcgcctgctgaatgacgtttaccgtcgcggcgttggtacgccaggtctctttcccgccacgcaggatcgcggcgttaccggtcttcaggcacagggaggcgacatccaccgtcacgtttggacgcgcttcgtaaatcaccccaatgacgccgagcggtacgcggcgacgctcaaggcgtaacccgctgtcgagcaccccaccgtcaatcacctgccctaccgggtcgggaaggttgcacacctgacggacgtcgtcggcgatacctttcagacgcgccggggtcagcgccagacggtcgagcatcgcttcactcaagccgttgcgacgcgcttccagcagatcctgctcgttggcgagcaaaatttcctgcgactgagattccagataatcagcgattttttccagcacgcgatttttctcgcggctggaaaggagcgccagtttataagaggcggctttcgcggctgcgcccatttgttccagcatgttctggctccttaacgaataatcatgtcgtcacgatgcacggcaaccgggccatattcatagcccaggatggcgtcgatctgctgggaatggtgaccagcaatccgacgcaacgcgtcgctgttataacgacttacgccatgagcgatgtcgcgaccttcaaggttacggattcggatcacttcaccacgcgagaagttgcctgtcacgcttttaattccttttggaagtaacgagcttcctctttccagaatagcggcggtcgcgccttcatccacggtcaattcgccagccggtggcgcaccaaagatccagcgttttcggttttccagcggggacgcctgggcgtggaagcgagtgcccacagagatgccttccatcacatcaccgatcacacccggacggctgcccgcggcgatgatggtgtcgataccggcccggcacgccacgtccgcggcctggagcttggtgcccatgccgcctgtccccagaccagaaacgctgtcacccgcaatggcacgcagcgcatcgtcaatgccgtgaacgtctttgatcagttcagcctgtggattagagcgcgggtcagcggtaaacagcccctgctgatcggtcagaagcagcagcttatcggcccctgccaggatcgccgccagcgcagagaggttatcgttgtcgcccactttgatttcagcggtggcaacagcgtcgttttcgttaatgaccggaacgatatggttatccagcagcgcacgcagcgtatcgcgggcgttcaggaaacgttctctgtcttccatatccgcacgcgtcagcagcatctgcccgacgtgaatgccgtagatggagaacagttgttcccagagctgtatgagtcggctttgtcccacggcggccagcagctgtttggaagcgatcgtcgcggggagttcggggtagcccaggtgttcacgcccggcggcaatcgccccggaagtcacaatcacaatacgatgccctgcggcatgcaactgagcgcactgacgtacaagctcaacgatatgggcacgattcaggcggcgcgatccgcctgttaacacactggtaccgagttttaccaccagcgtctggctgtcactcatgattctctgccgttcaacaataagggaaaatgatgtcagtcagacgttttaacaggtgtcagctccgttgccaactgccttagcgcatgacccgtcactttattgcgcgggatcaggaagcgtagcggcagattttgacaattttattaccgaaaaattaaaacatacttttttagacatattcttactttgtcataaaactttcacccacgaacgataaaacccttcctgtttttcacggggtaataagtcgaatcttattactcagcgaatattagcgcgtttttataaaatcaggattgaaaatgaaaaagagcactctggcattagtggtaatgggcgtagttgcttccgcatctgttcaggcagcagaagtttataataaaaacgggaataaactggacgtgtacggcaaagtaaaagcaatgcactacatcagtgatgatgacgctaaggatggtgaccagacttacgttcgtttcggctttaagggtgaaacgcagattaacgatcagctgacgggctacggacgttgggaagctgagttcgcaggtaacaaagctgagagcgactcttctcaaaaaacacgtctggcatttgccgggctgaaactgaaagacttcggctcactggattacggccgtaacctgggcgcgctgtatgacgtcgccgcatacaccgatatgttcccggagttcggcggtgacggcctggcacagaccgataacttcatgacgaaacgcgcctccggtttggccacataccgtaataccgatttctttggcctggttgacggcctgaacatgaccctgcaataccagggcaaaaatgaaaaccgcgacgtgaagaagcaaaacggtgacggcttcggtacctccctgagctatgacttcggcggcagcgatttttctgtgattggtgcgtatgccagctccgatcgcactaacgatcaaaaccttcaggcacgcggcgaaggtaaaaaagcagaaggctgggcaaccggtttgaaatatgatgccaacgatatttatctggccactatctattccgaaacccgcaatatggcccctatttccggtggctttgcaaataaagcgcaaaacttcgaagtggttgcgcaatatcaatttgactttggtctgcgtccatctctgggttacgtgcagtctaaaggcaaagatatcgaaggtatcggcgatgaagatatcgtgaaatacatcgacgtaggtgctacatattatttcaacaaaaatatgtctgcgtttgttgattataagatcaaccagatcgatgacgataataaactgggcgtaagcagcgatgatatcgttgcgctgggcatgacctaccagttctgatgttgtggtaataaaaaaccggcgctgagccggtttttttgtgcccggtgacgctgtgcttaccgggcgtacgggatagtacatttttcatgccgggtaaggcgtagccgccacccggcgctgtgacatcatcaggctctcagtttcaccgcttcgctggaaaaatcgtccgcaggctccagcttcagatccagcgttgccagcagatcacgagctttgccgtgaaattcttttagcgtatgctccagacgatcgatcacttcctgatctttgatgctcgtcgcctgccagtgcccgtctttattaaacaggccaaactgatagctataggtaaaacggttttcctgtgcttacatttccatccaccagccccagaactcacgtttttcgggtgcaggcttcacgttgacgcaaacagccaggcagtcgaaaaaaaagcgattctcttcacactgctcttctcgaatatacgggccaagagccatgaacttcttaatcagtctacttttcgggtgtccactcggtaacgtcattgcgatctccttttgtgaagcactgttttaccaaaccaacgaaatttagcaaactattaacacaatctctgcgtgatccagcgtgtgatctctttcagcgctttgtcaaaattctggtacaccgggctgaagggtacctccagcaatttaccatcagaagatgacgacgtgattaagcgtgactcctcttccgggctaaacggatcgttcttccagaaaccggacatcatcggggttgggcagcggcggccgagtaagccctgcgtttttaatgaataacgattaagttcaatgcgcaacgcttcgtctgaagcatcatgcatgccaagtcggctcgccagcacgtccagatacatctcaggaacgctaccctgacgcgcaggatcgcttaacagagcatgcaccaccgggccaagacaggcgacggccttcaggcgtgaagattcaaggtaggcaagccgtaccgcgacgttagcgccaaagcggaagccaaacgcgccaacccgggtgtggtcaacccaggggatattctccagcgcttttaaagcatgctggtgcagcaggctggagtcttgcgtaagtttccatttggatgaaaaaccaatggaaggcatatcaagcgtcagcatggcgattccgtttggggcaaagtagcgctcatacaggctgtaatagtcaatttgtaacgagtccagtccaccgcacatcagaaccgtcgggaacggcccttccccctccggcatatgcaggaatccggtcaccgggctgccaccgggaatggcgaactcaatttcacgcatccggccaggcaaccgctgcgcggcctcttcataagcccggtttgccagcgcctgggcctgctctgccagttcgtcgcctttaagatgcggatatgcagcgatgctgtacagatttgccgcatgtagccagtgctttccgctgagagtggcgtcttcttcctggctcgctttttgctgccagagcatggcctgctttgaccattcgtagatccagtttccaccacggtagcccaccaccgtatcgtagagatcgccgtcggtacgctcggactcactcatcacgatacgcgcctgcacgtcgaggatttcacgcggatcgatgccgcgccagatccacatcaggcggttaatcattcgataccagtggggcacgttctttccgtctaacgctgactgaacggcaggcattgtccccggattaaaccgacgcaccagcgtcgacgtttcagggtgcttgaaacggggtttgaagagagtttcggtaagattcgcctgcgtcattgcgttgcctccatggatacgtcatatgaagaccattgtaacgcgtggcaggctaaaaagaacaacgcccggcataaccgggcgtgtaaagttacgtactgaaattaacggccagagataggcggtacgaagaccacgcccatatcccatggctgttcaatccaggtatcctgcgggatatcaatgacgtaatcatcaaccagtgggcgacccgctggtttcgcgaagatcgtgacgaagtgcgcttttggatacatttcgcggatagccaccgcggtaccgccggtgtccaccaaatcgtcgataacgataaagccttcaccgtcgccttccgcgcgtttcagcactttcagttcgcgctggttgtcgtgatcgtagctggagatacatacggtatcgacatgacgaatacccagctcacgagccagcagcgcccccggtaccagaccgccacggctgacggcaataatgcctttccactgttcggaaggcatcagacgcgcagccagtttgcgtgcgtgaatctgcaacatgtcccaggtgacgacgtatttttcgctcatgtgaagtgtcccagcctgtttatatacggcttaaaaaaatgagggtgaaccaggttgcgcgagattatagagatctgacgcactaaaaaccagtgttacgcgccatgagcctgagtttttacatgcttaatgctaccagccacgggagaaagtggtattctcagttgcatctcgcaagcctgacttgtggtaacgattaacctgctaaccctgtgacctgcaacattgttttgcagcgcaacgacaaggagacctatcgtgtctgaactgtctcaattatctccacagccactgtgggatatttttgccaaaatctgctccattccgcacccttcctatcacgaagaacagcttgccgaacatattatgggttgggcgaaggaaaaaggtctgcacgctgagcgcgaccaggttggcaatattcttatccgcaaacctgccaccgcaggtatggaaaaccgtaagccagtggtattgcaggcgcacctggatatggttccgcagaaaaacaacgacaccgttcacgacttcacaaaagacccgatccagccgtacatcgacggtgagtgggtgaaggcgcgcggcacgactctgggcgcagataacggcattggtatggcttccgcgctggccgtgctggctgacgacagcgttgaacacggtccgctggaagtgctgctgaccatgactgaagaagcgggcatggatggcgcgttcggtctccaggcaaactggctgcaagcggacattctgatcaacaccgactccgaagaagagggggagatctacatgggctgcgcgggcgggatcgattttatctctaccctgccgctgtcccgcgaagcgatccctgccggattcgagacctttaagctgacgctgaaagggctgaaaggcggtcactccggcggtgatattcacctgggcctgggcaacgccaacaaactgctggcgcgtttcctggcgggccatgccgctgaactggatctgcgtctggtggacttcaacggcggtactctgcgtaacgcgatccctcgcgaagccttcgctaccgtggcggtgcctgcgtcgaaagcggacgagctgaaaaacctctccagcgtgtatctggagatcctgaaaaacgaactgtctgcaaaagagaaaaacctgacggtggtgctggagtccgttacgacggataaagccgcgctgaccgcacagtctcgtgacacgttcgtccagttgctgaacgcaacgccaaacggcgttattcgcaactctgacgtggcgaaaggcgtggtggaaacctccctgaacgtgggcgtggtgaccatgggtgacgacagcgcagagatcatctgcctgatccgttccttgatcgacagcggtaaagagtacgttgtgagcatgctggaatctctgggtaccctggcgggcgcgaaaacgtctgcaaaagggagctacccgggctggcagccggatgcaagttctccggtcatggcactggtgcgtgaaacttatcagcgactgttcaacagcaccccgaacattcaggttattcatgcgggtctggagtgtggtctgttcaagaaaccgtatccggatatggacatggtctccatcgggccaaccatcaccgggccacactccccggatgagcaggttcacattgaaagcgtcggtcactactggacgctgctgactgagctgctgaaagcaattcctgttaagtaattagccgtttgatgcccggtggcgctacgcttgccgggcctacgattagcgtaatctacagtcccaacaccagttgacgctccagctgcggatccagcaaggtgacgtgcagccccaccagcctcacccctcgtccgccccgccgttcttcccacgcctttttcgccgtcgcgataagatcctctttgttgaggcgtggccagacgtgctcctgcgtcgtctgctgaaaatcgttaaatttcagtttgatgccctgtcgggcaataagcagatccggtttgaccttcagtaagcgtcgttcaagctcaggataaagctgttccgtaataatggattcacactcggtccagtcatggatgtcttcgctcagtgtgcgttcaacgccgaccgatttacgcagccgttcgttgttcacatcccggtcatcaatgccctgactgcgttcccacagtacgcggccaaacttgccaaaacgcttaagcagcagcgccagatcgctgcgctgaacatcttcgcaggtgcgtagccccatactttccagcttcgcggcggagactttgcccacgccggggattttgctgagcggcagcgtctttaaaaacgccggaacctcttccggagtgatgacgtactggccgttgggcttatttaaatcggaggcgattttggcgagaaatttgaccggcgcgacgcctgccgatgccgtcaggttcagctcgttaaaaatagtctggcggatctcctgcgccatcagggtggcggagccgtggcagtgcacgctgtgggtgacatccagataggcttcatccagcgataacggttcaatcagtgaggtgtagcgggagaagatctcccgaatgtggctcgatgcttctttataggcatcaaaacgtccgggcaaaagagtgagatgcgggcacagtttcagcgccatcgctgtcggcatggcgctgcgcacgccgtatttgcgagcaggatagttggcggtgctgatgacaccgcgctgaacccggctgccgccaatggcgatgggaatatcccgcagcgccgggttgtcacgcatctccactgcggcaaaaaagcagtccatatcgacatggattattttgcgcatagtaagccctcacttattactggataagtatacagtaaacaaatgagggttgagaagtgcgcgcaggaattgtcgggtggcggcgttgccttacccgacctggaagactaaataatgcgttgctgctcgcgagccatccgctttttccgcgcatcgcacggttccggacaatcgcacactttttccattccgatggaagagatgcctccgcaactgccctgaatgcttttacgcttgatgatccagcctaaggacatgccgaagatcaccagcacaaacaccgcaaaggtcgccagaaaagtcagcataatcagcctccgaaatcatcgagcataatgttctcatcttccacgccaagatcttttagcatcttaatcacggcggcgttcatcattggtggaccacacatatagaactcgcagtcttccggtgccgggtgctgtttgaggtaattttcatacaacacgttgtggatgaagcccgtatagcctgtccagttatcttccggctgcggatcggatagcgccacatggaaggtaaagttagggttatcacgcgccagttgttcaaactcatcgtcatagaacatttcgcgcagtgaacgcgccccgtaccagaagctgatcttacgcttgctgccaagtcgtttgagctggtcaaaaatatgcgaacgcatcggcgccatacccgcaccgccgccgataaagaccatctccgcgtcagtatctttggcaaagaattcgccgaacgggccggaaatcgtcactttgtcgccaggcttgagggaccagatatacgacgacatgacgccaggaggggcatcaggcacattcggtggcggcgtggcgatacgcacgttgagcataataatgcccttctcttccggatagttagccatggaataggcgcgaagcgcgggctcttttacctcggaaacaaagcggaagaggttaaatttatcccagtctgcccggtactcctcaggcacatcgaagtcagcatacgcgacggtgtgtgccggacaatcaatctggatatacccacccgcacggaacgggacgctctccccttcagggacacgcagcttgagctctttgatgaacgtggctttgttatcgttagagataacttcgcactcccattttttcacgccgaagatctcctccggcagctcaatcttcatgttctggcgcacagcgacctggcacgccagacggcatccctctttcgcttcacgcttcgtgatatgcgacagttccgttggcagaatatcaccgccgccctctttgaccgtcacacggcactggccacaggagccaccgccgccacaggcagacgagacaaaaatcccgttgccggagagcgtgttaagcagcttatcccctgccggggtacggatctgattctgcggatcgtcattgatatcaatgatcacatccccggaattgaccagcttcgcacgcgccgccaggatcagccctgacagcaccagtactatcagcgtgaacatcaccacgccaagaataatttccatctgttagcccttatagctgcacaccggagaaggacataaagcccaacgccatcaggccggtggtgataaaggtgatccctaagccacgaagccccgcaggtacgttggcatatttcattttttcacggatccccgccatggtgacaatcgccagcatccagccgataccggaaccgaagccatacacaaccgattcactgaaattgtaatcgcgctgaaccataaacgagacgccaccgaagatggcgcagttcacggcgatcagcggcaggaagatccccagcgcgttgtacagcgacgggaagtatttatcgaggatcatctccaggatctgaacaagcgccgcaatcactccgataaaggtgatgaagttcaggaagctaagatcaaccccctccaccagcgcgccatcgcgcagcacgaagttgaataccaggttgttaatcggaacggaaagccccagcacaacggtaactgccacgcccagaccaaatgccgtcgatacctttttagaaacggcaaggaacgtacacatgcccaggaagaaagcgagcgccatgttttcaacaaacaccgcgcgcacaaataaactcaggtaatgagccattgtcggttactccttttcctgctgttcaggcttcaacgtacgaatcagccagatcagcaaaccgataatgaaaaatgcgcttggggccagcaggaacaggccgttcggcagataccagccgccgttctgtaccgtatccagcaccggaatgccaaacagcttgccgctgccaataagttcgcgcaggaaaccaaccgtcaacaggatcacgccgtaacccaggccgttaccgataccgtccataaagctcgccagcggtggcattttcatcgcataggcttcagcacgccccatcacgatgcagttggtgattatcaggccgacaaacaccgaaagctgcttcgaggtttcataggcgaaggcgcgcaggagctgatcgaccacgatcaccagcgaggcgataatcgccatctgcacgatgatcctcacgctgttgggtatgtggtggcggatcattgagataaacatgctggaaaacgctgtcaccagcgttaccgccagcgtcatgaccaccgccgtttccagcttggtggtcaccgccagcgccgagcacacccccagcacctgtagcgttatcgggttattggctaacagcgggccaatcagcacctttttaacttctttcagttcacccgtatcagccattattcagcgctccttcacgtacattcttcaggaagggaccaaagcccagttcacccatccagaaatcaaagctgtgctgcacaccgttagaggtgagcgtggcaccggaaaggccatcaacggcaaattcatcgccgggacgcgcgccccctttcaccaccttcagcgcaggctggccgttgtcgtcgagcacttttttaccaacaaactgtgcccgccagttagggttctcaacttcgccccccagccctggtgtttcgccctgatcgtaataagtaatgcctttcaccgtacgaccatcggtatccaacgccacaaaggcgtacatcattgaccataaaccgttgccatagatgggcaacacgatttcctggatgcgcttttgctcgtcacggacgaggtaaatctccgcgacattgctgcggcgcttaatgcctgccggatcctgcgaggcgtcaagcgtggtgctcatctgcggatcttttagcgccagcgcctggttgtatttcgccgggtctttatccattaactccccggtttttaaatccaccagccgtgcggtaatacgttcggcaaacaccgctgcgacgtcatccttcgtcatgccttcctgcatcagcccggccacggccaggatgttacgctgtttatccagcgctcgttgctcctgctgtagcggttttaaccctacggcagaaccggccacgacaatggaacagaccagacacagtaccagcaccaccagcagcgttttgctgatgctgtcgttatttttgatctcagccacgcgccttcctccgcttaatgttggcgcgcacgaccaggtagtcgaacagcggcgcaaacagattggcaaacagaatggccaacatcatcccttccggataagccgggttgaccacgcgaatcagtacacacatcaccccaatgagcgcgccgtaacaccatttacctctgtcggtaaacgaagccgagaccggatcggtggccatgaacatcatgccaaacgcaaagcctcccagcacaaggtgccagtaccacggcatggagaacatcgggtttgtgtctgaaccaatgaagttgaaaagcgtggcggtgagtaccatcccgagcatgacgcctgcgacaatgcgccaggacgccacgcggccaaagaggatgatggccccgccgatcaaaatcatcagggtagacacttcaccgatggagcccggaatattgccgataaacgcatcaaaccaggtgacaggctgtccggttgcattattgaccagcgtttcgccgccgccagccgcccactgtgaaagtggcgtcgcgccggagaatccgtctgctgccgtccacaccaggtcgcccgagatttgcgccggataagcaaagaacaggaacgcgcgccctgccagcgccggattgaggaagttgcgtccggtcccgccgaagatctccttggcaatcaccacgccaaagctgatccccatcgccgcctgccagagcggcagcgttggcggaacaatcagcgcaaacagaatagaagtaacaaagaagccctcgttgatctcatgtttgcgaataatagcgaaaagcacctcccagaaaccgccgacgataaagacagtcatatagatagggaggaagaagacagcgcccagcgtcatcatgctgacccagccggcatctgccgcaaagctcacccccagcgactgcgccagacgatagtgccagtcagactgaatcacctgcgccagctgctctgcatcgtacatatggtgcagcgccggaatagtttgcaacccaacgttatacatcccccagaacatggccgggaagaccgcaaaccagaccagaatcatcattcgcttgaggtcgatggcgtcgcgaacgtgcgccgcgcctttcgtcaccagacccggcgtgtagaaaatggtcgttgtcgcttcatacagcgggtagtactttttgagcttcccttcggtaaagtgcggctcaattttttcaaagaggtgttttaagcccatggttatccttcctgctcaatgcgggttaacacctcgcgcaatacgggtccatattcgtatttacctggacacacataggtacacagcgccagatcttcttcgtccagctccagacagcccaacgcctgggcaccgtcggtatcgccggccaggagatcgcgcagcagcacggtgggcagaatatccagcggcatcacgcgttcgtagttgccaatcggaaccatggcgcgctcaccgccgttggtactggtggagaagttaaacagcttacgacgcaggaagtggccgagcgtggtgcgggttaccgagtatttttctgcgccaggcagcacccagccgaacagctctttctcccgcccttcaagcaccacgctcacctgaagatggaaacgacccagccaggccatcgggcctgtcgcgtgcctgccgctcagcaccgaaccggaaataatacggttttcaccctctttcgtttcgccagccaacagcgccgtcaggtctgccccaagcagcgtgcgaaccagacgcggttgggttgcctgagggccgccgatggcaataatgcgttctgcgcacagctcacccgtggtgaacagcttaccgatagcgatcacgtcctgataattaagatgccagacctgtttcgtcaggcttaccggctccaggaaatgaatatgtgttcccaccagcccggccggatgcggaccggcaaattcattaaaggctacctgcccttgcggatgcccgcccagcttaccgccgctggcctggcagacatgcactttgcccggcgtcaggcgcgttaacacggtgaggccggcatcgaaagctttgcgttccgccaggataagaggctgcggatctgcgctgagcgggttggtgtcgatggccgtaacgaagatagcggccggcacagtgccaggcacgggcgttttgctataggggcgcgtgcgaagcgccgtccacagtcccgactccagcagttgcgtctgcaccgcgtcgtggctgagggtgacaagatcggcggcgtcaaaacgcgcaaattcgcgtttctcatcgccttcaatttgaataacaaccgattgcaggacgcgacgctcaccacgatggatgtcgacaacggtgccgctggccggggctgtaaacataacgccaggattttttttatcctcgaagagcgcctggccttttattacgcgatcgccttcctgtaccagcatcgcgggacgcatgcccacgtaatcatcacctacaatagcgacatgatgaatactggcgccggtggtaacgtgctgttcaggcacgccagagattggcagatcgagtccttttctgattctaaacatgtggttagcaggtatccatgaacaacaatccagagaggccgaagtgtaccattttcggctctgccaggggcagcaaatccgccgtctgacgcgctgaaatgcgagctattgcgcaaagttcctggagtcaggacaatgtgaatgggttataaagtaaaactaatttgtaaacgcaaaggttggctcttgcgaaaatctccatcggtgctaatgtgagcgctcctgtccagattagtctgatttcgggtgtcttttgccgttctggcaagttggtcattgttttatcaaggaaccagtagtatgcgtaaaatcgcattgttcattgcgatgcttctgataccgtgcatgtcgtttgccgggctgcttggcagtaatagttcaacgacgccggtcagcaaagagtataaacagcagttgatgggatccccggtttatattcaaatcttcaaggaagagcgcacactcgatctgtttgtcaaaatgggcgagacgtatcagctgctcgatagctacaaaatctgtaactattctggcgggctggggccgaaacagcgccagggtgacttcaaaagtccggaagggttttacaacgttcagcgtaaccagctaaaaccggacagccggttctataaagcgattaacatcggtttccccaatgccttcgaccgtgcacacggttacgaagggaaatacctgatgattcacggtgcctgcgtgtcagtcggttgttatgcgatgacggattccggcattgatgaaatcttccagtttgtcacgggcgcactggtcttcggccagccgaatgttcaggtcagcatctacccgttccgtatgacggatgcgaacatggcgcgccataagtactctgtttacacagatttctggaaacagctaaaaccgggctatgactacttcgagcagacccataagccgccggtggtgtccatcgtcaatggccgttacgtggtgagtaaaccgctcagccatgaagtggttcagccgcagctggcgtcaaattacgcggtccccgagacaaaatagcgcccactcgcctggcatgatcttttgccaggtttcgttgccggtcagcggctgcgttgcaatgacagtgaccacatcgttcggtgtggtctccttctgaaaatcaatttccacatcctgatcgagcagcgtggcgacgccaaacggcgcacgtcgggtgatccagaacagattcgtcgagcagaacgccatcacgtagcgcccgtcagacagcagcatattaaagacgcccttctcgcgtaactcaaacgccagtgacgctatgtacttaaaaacggcggtcatgttgccgggcgtacgggggtagcgctcggtcagcttgtgcagcagccagcaaaatgctttttcgctgtccgtttcaccgacaggacggaaattgccggtttccagcgacttatagcccgaaagctgcccgttgtgcgcataggtccagttacggccccacagttcacgggtaaacggatgggtattttccagcgccacttcgccgcgatttgcctggcggatatgggcgatcaccgaacaggatttaataggatagtcctgcaccagtctggcaatgggtgagttaaagctgggttgtggatctttaaacgtgcgacatcctttgccttcgtagaaggtaataccccagccgtctttatgcggcccggttcctccaccgcgctgaaccagcccggtaaaactaaagcagatatcggttggcacattggcgctcatcccgagcagttcgcacatagatcacctccacaacagcggggggcaccggcgccccccagcgaagtcttacttaaccatctctttttcgatcagttggatcaggatgtggatcactttgatgtgaatttcctgaacgcgatccgcataaccgaagtgtggtacacggatttcaatgtccgctgtaccgtccatcttaccgccatctttcccggtaagggtgatcactttcatgcccttctcacgcgcggcggcgatcgctttgatcacgttagcagagttaccggatgtggagatacccagcagcacgtcgccttcacggcctacggcttcaacgtagcgggaaaagatatggtcgtaaccgaagtcgttgcctacacaggagatgtggctcacgtcggaaatcgcaatcgccgggtagcccggacggttttcacgatagcgtccggtcagctcttcggcgaagtgcatggcgtcacagtgggaaccgccgttaccgcaggagagcactttaccgccggctttgaagctgtcggcaagcaggaccgccgcgcgctgaatagcgtgaatattggcatcatctttcagaaaattcgccagcgtttccgccgcttcgttcagttcgttacgaataagatcctggtacatgaggataatccttcagtattgatgaaataacacagtggagtgtaccggatagcagtaaaagcgagaagctaaagccatgcgaatcgtccggcgttttgattttttgtgccggctaaaacgcgaacaatgtgaaccaggttgtaattattttgtaaacacattgctaaaggaaatgacatcaactacaaccatatcatcacaagtggtcagacctcctacaagcaagggagcttttctttatgatgattttgagcattttcgcaaccgttgtgctgctcggtgtgttgttctatcaccgtgtcagtttattcctgagtagcctgattcttctggcctggacggctgcacttggcgtcgctggtctgtggaatatctgggtccttgttcccctggccatcattttgctgccgttcaacctgacgccgatgcgtaagtcgatgatctctgcgccggtgttcaggggattccgtaaagtgatgccgccgatgtcgcgtacagagaaagaagcgattgacgccggtacaacctggtgggaaggcgatctgttccagggcaaccccgactggaaaaagcttcacaactatccgcagccgcgtctgaccgccgaagaacaagcctttattgatggtccggtagaagaagcgtgccgcatggcaaacgactttgccatcactcacgaaatggccgacctgccgcctgagctgtgggcatacctgaaagagcatcgcttcttcgcgatgatcattaagaaagagtacggcggtctggaattctccgcttacgctcaggctcgggtgctgcaaaaactggcgggtgtctccgggatcctggcgatcaccgttggcgtgccaaactccttaggcccgggcgagctgttacagcattacggtacagaagagcagaaagatcactacctgccgcgtctggcgcgtggtcaggaaattccgtgcttcgcgctgaccagcccggaggcaggctccgatgccggcgcaatccctgataccggcgtggtttgcatgggcgaatggcagggccagcaggtgctgggtatgcgcctgacctggaacaaacgttatatcaccctcgcacctatcgccacggtgctgggccttgcgttcaaactctctgacccggaaaaactgctgggcggtgaagaagagctgggtattacctgtgcgctgatcccaacctcaaccccgggcgttgaaattggtcgccgtcacttccctctgaacgtaccgttccagaacggtcctacccgcggtcaggatatctttgtcccgattgactacatcatcggtggcccgaaaatggccgggcagggctggcgtatgctggtggaatgtctgtctgtgggccgcggcattaccctgccgtcgaactcaacaggcggtctgaaatcggtggcgatggggattggggcttacgcgcatatccgccgtcagttcaaaatctccatcggcaagatggaaggtatcgaagagccgctggcgcgtattgcgggcaatgcctacgtgatggacgccgcagcctcgctgattacctacggcattatgctgggtgaaaaacccgccgtgctgtcggcgattgtgaagtatcactgtacccaccgcgcacagcagtcaattattgatgcaatggatatcgcaggcggtaaaggtatcatgctcggcgaaggcaacttcctggcgcgcggctatcagggtgcgccgattgccatcaccgtggaaggggcaaacatcctgacccgcagcatgatgatcttcggccagggtgcgattcgctgccatccgtacgtgctggaagagatggctgccgcgcagaataatgatgtggatgccttcgacaagctgctgttcaaacatatcggtcacgtcggcagcaacaaggtgcgcagcttctggctgggcctgacgcgcgggctgaccagcgcgacgccaaccggcgatgcgaccaaacgttactaccagcatctgaaccgtctgagcgccaacctggctctgctgtctgacgtttccatggcggtgctgggcggtagcctgaagcgtcgcgaacgcatctccgcccgtctgggtgatgtgctgagccagatcttcctggcctctgcggtgctgaaacgctacgacgatgaaggccgtcaggaagcggatctgccgctggtgcactggggcgttcaggatgcgatgtatcaggccgaacaggcgattgacgatctgctggcgaacttcccgaaccgcttcgtggcgggtgccctgcgcgcggtgatcttcccgaccggtcgtcatcacctggcgccgtccgacaagctggatcacaaagtggcaaaaatcctccaggtaccaagcgcaacccgctctcgtattggtcggggtcaatatctggcacctaccccgcataacccggtaggtttgctggaagaggcgctgcttgacgtgatggccgccgacccgattcaccagaagatctgtaaacagctgggcaaaaacctgccgtttacacgactggatgagctggcaaaacaggcgctggcaggtggcatcatcgacaacagcgaagctgcgattctggtgaaagccgaagagagccgtctgcgcagtattaatgtggatgatttcgaacctgaagagctggcgacacagccggtaaagctgccagagaagcaccgcaaacctgaagcggcataaggccttttgctctcacaaaccccgccccgcgcggggttttttattgccacattttctggtaatgacgtgctacagtgtcaaaaagtgtttattaaggagcctgtatcgtgcctggtttaaagatttctgttttgcagcaacctttagtgtggatggacggccccgccaaccttcgccattttgatcgccagctggaagagattaccggacgcgatgtgattgtcctgccggagatgttcaccacaggtttcgcgatggaggcagcaaaacagtccatgccgcaggacgaggtggtggcctggatgcacgccagggcgcaggaaacaaatgcgctgattgccggtagcgtcgcactccagaccgggcgcggaccggtcaaccgcttcctgctggtcgagccggaaggaaaagtccatttctacgataagcgccacctgttccgcatggcggatgaacatcaacattatgaagccggaagcgaacgcgtggtatttgaatggcgcggctggcgtattctgccgctggtctgctatgacctgcgcttcccggtgtggtcgcgcaaccgcaacgattatgacctggcgttgtacgtcgccaactggcccgccccacgctccctgcactggcaggctttactgaccgcgcgcgcgattgaaaatcaggcttatgtcgttggctgtaaccgcgtgggaacggacggcaacgggcatcactatcgcggtgacagccgggtgatcagtccgcagggagagattattgccaccgccgagccgcatcaggcaacacgaattgacgctgagatctcgttaacgacgttaaaggagtatcgggagaagtttccggcctggcaggatgcagatccgtttagcattggttgaaaaaaagccgggtgacggctgcgccttacccggcctacaaaaagcacagcgtaggcacggtaagcgcagcgccaccgggcgttaattaactcaccagcgcctgcccgtctttgcggctttccgtcgcggccacgtagtgcccttccggcatacggtaaatcacctgcgcaccgccgaagttataatcctgaagcggatcttccaccgcgatctgatgcccgcgctcgcgcagcgccgcgatagtattgcgatcgaacgttgattcgacgatcacctccctgccctgcaccacgcgccagcgcggtgcatcgattgccgcctgcgggttttgcccgtgcagcataatgcgcagcgccaactgcatgtgcccctgcgcctgcatcgggccgcccatcacgccgaaggacatcagcggcttgccgttgccgtccatcgcaaatcccggaatgatggtgtggaacgggcgcttgctgcccgccagcgcgttcgggtgcgcaggatccagcacaaagccgcagccccggttttgcaggctgatcccggtatccggcaccacgatccctgaaccgaatcccatatagttggactgaataaacgagaccatcatcccactcgcatccgcggtgctgacgtaaaccgtcccgctctgcgtcggcgatccgtacacaaaatcagaggcgctatcgtggttgataagcgcggcgcgcgacttcaggtaatggtcgctcagcagttctttcgccgcgaacgccatatgttcttcatccgcaacgtagcggtcgagatccgccagcgccagcttcattgcctcaatggagaggtgcagagactgcacggagtccgggtggtgcttctcaatgccgcactgctcaagaatgccgagcgcaatcagcgtggcgatcccctgaccgttaggcggcagctcctgcaccgaaccgcccgcgaagtcgcgcgacagcaggtctacccagtccacgcgatggtttgccagatcctctgccgtcagatgcgcaccgtgttctttggcaaaagcagcaattttctgcgccagctcgccgcggtaaaacgcgtcaccgttagttttggcaatcagctccagcgagctggcctgcgccgggttacggaagatttcccccacgcgcggggcgcggccttccggcgcgaagcaggcgctgaagcccggctgatctttcagcttgctatagcctcgctgccagagatgaccaatcagcggcgagacgggaaagccgttgcgcgcgtagtcaatggcaggctgcgccagcgtggtcagcggcagcgtgccgaagcgctccgccagcgcgacccagccggataccgctcccggcacggtcaccgcgtcccagccaatttccggcactgcgctttttccggcaaacagatccgcatgccagctggccggcgagcggcctgatgcgttgaggccgtgaagcttttcaccgtcccagacgatggcaaaggcgtcgctgccgatcccgttgccggtcggctcaaccaccgtcagcgccatcgcggtggcaatggctgcatcgacggcattgccgcccagttgcagcatcttcatccccgcctgcgccgccagcggctgcgacgtggcaaccgcgttatggcccagcatcggcggacggcgtgaatcgtaaccggacgtaaaatcaagcgctttggtcatcatgactccttagtcgtggcgcggatcgagcgcatcgcgcagcccgtcgccgagtagattaaagccctgcacggcaaggaaaatcgccacgccggggaaaacggacatccacggagcctgctccagaaaccctttcgcggtgttgagcatggagccccaggacggatttggcggctgctgtcccagccccaaaaacgacaggctggcttcggcgataatcgccgaggcgatcgccagcgtggcctgcacgaggatcggcgacatcacgtttggcaggacgtatttaatgatgatccagcgatccggcaggccaatcgcccgcgcgccgtcgatatactcttcgttgcgaatggcgatcacctggccgcgcgtcagccgggcgaaaatcggcattgccgagagaccaatggcgatcatcgcattcgtcaggcttgggcccaaaaatgcccccagcgcgatcgccatgatcaggaacggacaggccagcaaggcctcaataaagcgcgagatcacgccgtcccacatcttctggaagtagcccgccaccagccccagcggcacgccgatgaccacggcaataatgaccgacatacagcccgccatcagcgaggtgcgcgccccccaaataatgcgggataagatgtcacgccccagctcgtcggtgccgaaccagtacatcgccgacggcgctttgcgcaccgccaggaagttggctttgaccgggtcgaagggggcgatccacggcgccagcagcgccaccaggacaaaaaagcccaccacaagtgcgccaatcaccgcgcttttattgccgagaaatttcttcagcacccggttctgcgcgcgcggcagcgtgggggcaacggtttgcgtcgtcagttccgccatggttaacctcgcattttcgggttgataaggacgtagagcacgtcggccagcagattgagcatcaggaagccgatcgccacgatcagcaccacgccctgcaccaccgcatagtcacgattgaacaccgagtcgacgatcattttgccaaagcccggaatggtgaagacctgctcggtcagcaccgcgccgcccagtagctcgccgaacagaagcgtggtgagggtgattacaggcaccagcgcgttgcgaaaggcgtgcttcaggatcactgctttcggcagcagccccttagcgcgcgcggtgcggatgtaatccgctttcagcactgcaatcatcgacgcacgggtatggcgcatcagcgtcgccgccagtccggttccgagcacggacgcgggtagcagcagcgtgcgcaggttctggatcggatcttcactgaatggcacataaccggacgcaggtaaccattgcaagttcaccgaaaagaccagaatcagcaggatccccagccagaagtgcggaattgatatccccgagatcgccacaaagttcgccccgtgatcgacccagctgtttttattcaccgccgcaaggatccccatgctgatgccaaacaccagcgcgatgatcatcgccagcagagagagctccagcgtgaccggcagcttgctggcaatcagctgcgtgaccggttcatgcgtgcgcaaggagacgcccagatcgccctgcagcgcgcgcgtcagccaatggaaatactgcacggggatcggcgcatccagattaagctcagcacgcagttgggcaatgaccgccggatcgcgctcctccccggccatggcgatcagcgggtcgccgggcagcagcttttgcagcccgaacaccatcatgctcaccagcaatagcgtcgggacggccagcagcagacgtttgcaaatcagttccagcatgggttctcctcaggacgtttattttgccagcgtcaaaccggccagacgcacgatgccgtccgggtacggcttaaagccctgcacgcttttgttcaggccaaaaatgcgcggctcgaagtagaggtaggcaatcggcatgtcggtctggagctgcttcaccaccttgtcgtacagcggctggcgtacggcctggtcggtgctctgacgcgcctgagtcagccattcatcgatctgcgcgttgctgtatcggccgtcgttcagggtgcctttactgttgataaagccgtaaatgctgccatccggatccgggcgccccgaccagccggagaagctcaactggtagtcaccgctctgctggcgatccagcagcgtggcgaactcggtcatttgcaggttcaggttaaagcccgcctctgccaccatcgcctgcaatacctgtcccacctgctgcgaggttgggttgtttggcaccagcagattgacgctcagcggcgtggtcacaccggcggctttcagcagcgctttggctttatcgacgtcgcgcggcgggaccggcaggttaacgtggtacgggctgaccggtgaaaacgcctgatttgccggggtgtagagcccttcaaagaccacctggtttaacgcatcgcgatcgattgcctgagaaaacgcctcgcgcacgcgggcatctttgaacggatcgttggccggcaccttgccgttgttaatattgaaggtgatcccctgataccccagaccggtgaccttcgccagcgccagcttgctgtcggcttcgacggttttgacgtcgctggcggcaatgccttcggtcaggtcgagatcgcccgcgcgcaggttcgcgagacgcacggaggcatccgggatcggcagatagatgattttgtcgaagtgataggcgtctttgttccagtagttgtcgaagcgggtcagaacgatgcggtcctgcgacacgcggctgtcgaatttgtatggaccggagcagacgggatgggcggcaaagtcaggctttttcgccgcatcgggtgccatcatcgcgcccgcgcggtcggtgagctgcattagcagcgcggcatccggtgttttcaggtgcagcgcaatctgcatcgggccggtgacctcgaccgattcaacggatgagatctcgcttttacgcagggagcctttgagggtcagggcgcggtcgaggttgtattttgccgcagcggcatcaaatttttcaccgtcgtggaaggtcacaccttcgcgtagatccatagtcagcgttttgccatcttcgctccaggcccaggattttgccagacccggcaccactttcaggtgctcgtcgacgtccaccagcctgtcgcacagggaggcaaacacgaaacggccatagtaggtgcgcgccagatgcgggtcgagcatatccgggtcggcccccaggccgatccgcagcacgctttcagaatgggcgggcagcgccgcgccaagcaacataacacttcccagtacggtcaaaagagaattacgcattgtcattatcatgagttccttgaaggaagggaggagtgagtggccgcgtgttcaaacagcgcgcggcggcgcagaaaagcggcggatggcggtgcgatctggataacgctgcgatcgcgattgatctcctgccagcgatggcaggcaacctgacgtccgccgtcgagcacctgattaatcggctcgatctggcggcattcatctgtaacgtaggggcaacgggtgtggaaacggcagccggacggcgggttagccgggttcggtaaatcaccctgcaacagcggcgtatcccgcgctacgcctggctgcatttgcggcgctgaggcaatcaacgcctgggtataaggatgcaacggtgcgtcgaagatgtcgtcgacggtggccagctcgacgatttgcccaagatacattaccgccacgcggtcgctcatatgacggataaccgccagcccgtgggcgacgatcaccatcgttagccccaactggtgcttcaggctttccagtaaattaaccacctgtgcctgaacggaaacgtccagcgcagaaaccggctcatcacccagcagcagctttgggcctgacgccagcgcgcgcgcaatgccgatacgctgacgctgcccgccggaaaattcgtgtggataacgcccggcccaggctgagggcaagccgaccgtcctgagtagctcggagacgcggtactggcgatccgtttttttcatgttctggtgcagccacagcggctcaccgacaatttgctccaccgtcatgcgcgggttcagcgaagcgaagggatcctgaaagatgatctgtagctcacgccggagctggttcagacgggcgcccgaggcgtgggtgatctcctcaccctgataaaatacccgcccttcgctggcgcccagcaggcgcagcagcagacgaccaagggtggatttcccggaacccgactcgccgacaattgccagcgtttcgccaggcatcaccgacatcgaaactcggtcgacagcggtgacaaagcgggccggcgtaaacagttttttcgggccggggaaaagcttgctcagatcgcgggcttcaagaatgggcatggtcatgcggtctctcccagggcaatgtggtgttcgagcggcacgcggaagcaggcaacctgatggcccgtaccaagcgtagtgagcggtggtttttcagcatgacagcgcgtctgcgcgaagggacatcgggtggcaaagcggcagccttgaggcatggattccggcagcgggaccgatccgggaatagttgatagctggcctttacgcgcacccatagaaggaagggaacccataaggccaatggtataggggtgctgcggatcggcaaacagggcttcaacactcccctgctccactacctgtccggcatacatcaccgccacctgctgcgcgacttcagccaccacgcctaaatcgtgggtgatcatcagcaccgccgtgcccgtttcttcttttaaagtattgagcagggagagaatttgcgcctgaatggtcacgtccagagcggtagtgggttcgtcagcaatgagtagtttgggatggtttatcagcgccatcgcaatcatcacgcgctggcgcataccgccggaaagctgatgcgggtaagccttaaggcgcatctctgctgccgggatctgcaccttctccaggatctgtagcgcaaccgtcatcgcctcagcccgggagatcgtttgatggcgcatcaccgcttcactgagctgatcgccaagcgtgaaggccgggttgagcgaggtcatgggctcctggaatatcatcgccagctcgctgccgcgcagatcggcatactcccgcggcgagagcttgcgcagatcctggcggcggaaattcatctccccgctgacgatccgggcgctggcaggtaataaccccatcagcgccagggaagtgatgcttttaccgcagccggactcgcctaccagcgccagcgtttctcccgccctgaccgtcagcgagatatcgtcgagcacgctcaccggcgagcccgcgaatttaacgttgaggttttgcagccgcagtacgggcgtggagtccttaaagggtatcgtcgtcatagcgtggaatcgtcctcaaggtgaatagcctgaatcagggcggtttgcaggctgagcaggtgttcgcgcatggcggcagctgcttcgttaggctggcgatgaataatcgctgacatgattttgtgatggtggtcgttgtagctatcgacacgttcaggggtgcgggcaagttcgcgtaaatgctgccagccaggctcccggcggacggcatctatcgcatcaaaaagcccaagcatcaggcggttacctgctgcctccgcaatggcgcggtggaaggcgctatcccatagttcgttgagatcgcggtcatccgggctgaccttattaatgcgttccagcatacgctgcatgagcgcgaggttttccctggtggcacgcagtgccgcaagtcgggctaagccgggttcgagctgtagtcgagcttccatgacttccagcaggttggtttgctgaaccaatccctgaagcgccaacggctcaaccggggcagatggaccaatgaaggtacccttgccctgcttgcgccagatacgcccttcctcttccagcacgtccagcgcgcgacgcacttcacgtcggcctacgccgagagtgtccgacagctcacgttcagtgggcagcggaatgcctggtgttgactcgtgctggttgataagcccgcgcagctgctcaagcgcggtactggaattagctaaaaaccgtgaaggcttttccatattggttcgctcgctttcatcattgctttatttttattaataataagttattgatatgacgcagaacttaacgtgctagtaattaagcaattaacgaaccaatagcgtattggttcgttaattttctgaaaaatgatcggtaaccgaatgatttcctaccaattattttacataattattacataagaagatgggcgcgaaggtaaggatgggcaaaaaacgcacaaaaacagtgcaaataatgcactaaaatcgtgcatttgttaataaaatgcaccgcatttattaactttttgttaatggaaataaaaagaggaataaacaatattcgagggactataaaacgacgaaagcctgaatcatttctgactcaggctttctgaatagtggcggaacggacgggactcgaacccgcgaccccctgcgtgacaggcaggtattctaaccgactgaactaccgctccactgttcccgtttggggaacgaggcgaatattacggtttgcctctgaactcgtcaacgctttttctcaggttttgaatcgtttgctgcaaaattcacccaaacggtgatttaacaaacgtttcagcacattttcacgtgcgccacagacagcttccgcccttcttctgcactaaatcgagacgagattcatggttcatcagttcttcatcactggctaaaacaacccgcaggcgattcgcctgacgcacaatacgctgaattcccccttcatcccgcgtctgctgggattcattttccatactgaatttcatcgacgtttgcccgccggtcatggtcaggtagacatcggccaggatctgggcatcgagcaacgcgccgtgcagcgttcgcttggtgttgtctatctcatagcgagagcacagggcatcaaggctgttacgcttgccggggaacatcttccttgccagcgccaggctatccgtgactttacagaacgtattcgtcttcggaatatcacggttgagcttgctgaactcatagtccataaagccgatatcgaacgacgcgttatgaatgacaagttccgcacctctgatgtagtcgagaaattcatctgcgacgtcggcaaaggtgggcttattcagcaaaaactcatcggcaattccgtgaacgccgaacgcttccgggtccaccagccgatcgggtttaaggtaaacgtggaagttgttgcccgtaaggcgacggttcaccacttcaacggcaccaatctcaatgattttgtgcccttcgtagtgggcgccaatctggttcataccggtggtttcggtatcaagaacaatctggcgagtaattgcagtgctcatagcggtcatttatgtcagacttatcgttttactgaacgtttcaaatacaggaagtctaccagagatgcgtaaacaggtagaaattttcaccgatggatcttgtctcggtaacccagggcccggcggctatggcgccattatgcgctatcgtcagcatgaaaaaacatttagtgaaggctatttcctgaccaccaacaaccgcatggagttgatggcggccatcgtggcgctggaagcgttaaaagaacattgtgacgtggtgctgagtaccgacagccagtatgtccgccagggcattacccaatggatccacaactggaaaaagcggggctggaaaacggcagagaaaaaacccgtcaagaatgtcgatctctggaagcgtcttgatgccgccctcggtcagcacgaaatcaaatgggagtgggtaaaggggcacgccggtcatcctgaaaacgaacgctgtgacgagctggctcgcgcggcggcatccaacccgacccatgaggatgcaggttatcaacctgaatcctgatcacggttttttgtactgccgcgtggcccccacggtctggcggatccgcgtttttgatttgctttgcttcatcgggttgagcgtaagggggatcgtcctcttacgcgcgacaataaattgcatgcagcccagcgcgggtaaatgggtgcttaataagaccccgcctttacgcgtccaggggatgacctgaaaacccccgtagcttagcacttcgaaatttaacagtgaaagccagtccagctggcgcatcatggtaaacatcctgctgttataaggcggcgtgcgacgcagaacgggcgtcagtttacgtagccccatcagactcagcggattaaaaccgctcaggatcagccagccgtcatcaatcaaaacgcggtcggcttcccgcagcagacgatggggatcgctgcaccagggcagcgtgtgggcgagcagacaggcatcaatggatttttccgcaaacggcaaatgcagcggatccgctttcacctgaaccggggagccattaagcgatacgctaacctgatgcgagatagcgcagctttcggtattgatttctgcgctcagattgccaatcttaagcaggtgaaaaccatacattttcgcgagccagggtttaagctgaagttctaaggcctcgcgataatattcaccccagggcaactctgcccaacgttccggtggtgcgacagtctgaggtatccttgccggtttcatcaaaacacccgccacgctataagaggtaatgcatgaatcttatcagtatttccgcctttcaggacaattacatctgggttttagtcgacgacgatcgcagatgcatcattgttgatccaggcgaatccgcaccgatcctgcacgcgataaaagaaaacggctggcagccggaagcgatcctccttacccatcaccatcacgatcatgtcggcggtgttcccgatctccttgcgcgctatccccatctacccgtctacggaccagcagagacacaggataagggtacaacgcaagttgtcgaagaaggcgaaagtatcctcatcctcgggtgggagttttccgtatttgctacgccaggtcacacttccgggcatctctgtttctacagcaaaccttatctgttttgtggcgacacgctgttttctggcggctgtggaaggctgtttgaaggcacgccagaacagatgtatcaatctttacaaaaaattaatgcgctgccagccgaaaccgtaatttgttgcgcacatgagtatacattagggaatatgaagtttgctgcaagcgtgctgcctgaggatcgggcgattcaggattattaccagaaagtgaaggagttacgtgcaaaaaaccaaaaaacactccccgtaattctgaaaaatgagcgacaaataaatttatttttaagaactgatgatgttgatttaattaataaaattaatcaagaaacaaatttgttacaacctgaagcgcgatttgcatggttaaggtcaaagaaagataacttcagataattgcgggttgccttttcaaaatttcgccgttatcatcgctcgtcttttaagcaactattgacacacacatgaaggcaaaagcgatattactcgcctctgtcctgcttgtaggttgccagtcacaaaacggcagcaacgtacaacagcacgcacagagcctttctgcggctggtcaaggggaagcagggaagtttacgagtcaggcgcgatggttggacgatgggacatccttcgcgcaggaacaagacttgtgggcctctattggcgacgagctaaagatgggaattccggaaaacagccggattcgcgaacagaaacagaagtatctgagaaataagagctatctccacgatgtaacattacgggcagagccgtatatgtactggatagccgggcaagttaagaaacgtaacatgcctatggaactggtactactacccatagtggagagcgcttttgacccgcacgcgacgtctggcgccaatgcagcaggcatctggcagatcattccgagcacagggcgaaattatggtttaaagcagacccgcaactacgatgcgcgtcgtgatgttgtcgcttcaacgacagccgctctcgacatgatgcaacgtctgaacaagatgtttgacggcgactggttattgaccgtcgcggcgtataacagtggtgaaggtcgtgtactgaaggcaatgaaagcgaataaagcgcgtggaaaatccacagacttctggtcgctctcactgccacaggaaacaaagatttacgtaccgaaaatgctggcactgggcgatattctcaagaacagcaaacgttacggtgtacaactgccaacaccagacgaaagtcgtgcactggcgcgtgtccgcctcagcagcccggttgatattcaacaggttgcagatatgacgggtatgtcggtaagtaagcttaaaacctttaatgcaggtgttaaaggctccacgctgggcgctagtggccctggctatgtgatggttccgcagaaacatgcggaacagttacgagagtctttagcttcgggtgaaattgcagccgttcagtccacgctgatcgctgatacgtcgcctgtaagcagccgcagctataaggtgcgttcaggtgatacgctttcaggtattgcatcacgtcttggcgtgaatgcgaaagatctccagcagtggaataatctgcgcggatctggtctgaaagtgggtcaaacgctgtccgtaggtgcaggtagcagcgcacagcgtctcgctaaaaacagcgatagcattacctatcgcgtacgtaaaggcgactcgctgtccagtattgctaagcgtcacggcgtaaacatcaaagatgtgatgcgctggaacaacgatactgacaacctgcaacctggcgaccagctgacgttgtttgtgaaaaacagcgctacgccagattcctgatagtacgatcgcttgttaaaaaggcaccgattcccctcggtgccttttttatttatcccgctttttgcgcttcagccataatggtgtcgctggtaaacgaaccatcatcatgcagttcaaagtacgccttcacgtcagcagaggcgctctcctgatacaatcggatcgcctgagtcaatgcctcgggtgtgcgcatccgtgcaatccatgatgtgaactccagcggcaaacggtcggttatcaatgagcgtgaaatcaagccggcttcggtgataaacgtaagccactctccactggagtagttttgcacgtgcgaggtatcacgcagcgcttcaaccgtctggagccagatatttcgtactggatgtccgggagacatcacgtccatgatgatgaagattccgcccggtttgagcacgcgtttcacttcccgtaatgcctgccccacatcatgccagtggtgtgcagagtaacggctaatcacaacctcaaacgacgcatcctcaaagggtaaagattcagcgtagccctggcgcgtcgtgacgttattcagccctttcgctttcgccgcttcagcaaccacatccagcatctggctcgataagtcatatgccgtcacctgagcaacctgctgtgcggcggtaaaactggcgtgccccgccccgcagcctaagtccagcacgtgcgcgtcaggaaacgcggcgagccgttcgccgagacgtaccagatcgcggccagaggcgtgcacggcgctgctcaggtaggcacttgcctgagaaccaaactgtttttcgacgttgtcatgatgggagtgtgttgttgtcatgttgctgtccttttatgggttaaaaaataaagggcagcacccgcacaggcctgccccacggcagacctgacgcaccattatttatcaggtttgccgggactgaattcaactagtagaggattatgatcggaggcgcgcgtcaccagaacggaggcgtcgtgcacgcttaaaccccgatagaatacaaaatcgagaggacgaccaaacgctttcttgcgctggtcatcgttaaaacgaacttcacgcagcgacatttcacgcgcgaagcggtacaacgcgttcatacgcggacggctccaggcattgaagtccccggccataatgatcggcccactgtgatgagcaatctgatcgccaatgggtagtaactgcttactgtacacatcaacacccaggctgaagttcaccgcatgaatgtttaccaccatcagcaggcgggtgtcgggcaacggatagaccgtgaccagcgccgattttgccagacgcaggattggctcacgttcacgcagcgggcagcaatagaccggatgtgcggctgaaagggtcatcaccccagaaggatgctgtggcagaacaaaggcaggcacctgatcggctgcaagatagtttgtcgttgcaaacctgaccagctcaggcgtggtttgcgcctcctgtaacagaaccagatgcgcatctttaccaaaatttttaagtacggataaccactccgcacgctgttgtttaaagatgttccacaccagtacgcgaattttttcgtcactgcttaatggcgtgcccgctggtaatgcctgacccaggctcgcaaacgaccccggaggcaagatcctctccgcgggcattccggcaacataacgcatggcataggtattttttcgcacttttggaaacgacctctgtaacatgaaccagcccggaaaacggactggttctaatgttatagggattttaggtcacactttcaacgcaattacagagaaaccgctttccagttttgtaagcaagcacttactgatacttatccaagcgcgatacgagcgggtttatcaagtcgtccactcagaccaataagcaggaaagcgacaagcacaattaccgcaccaatccatggcgtttgggttaatccaacgtgttcaaccgtctgcccgccgataaccgatccgagtgcgataccgatattgaatgcggcgatattcaggccggatgcgacatccaccgcattgggcgtatagcgttcggctttctgtacaacatagacctgcaatcccggtacgttaccaaacgcgaatattcccataaccaacacagttaccagcgctgcgtattgtatcgacgcggtgaactggaaaatcatcagcaggacaaccagcgcggcgaagataaattttagcgccggtaccgcaccatgcttatccgcaagcttgccgccccagatattgccgattgcaacggagataccgtagcccagtaaaatccagctcactgcgcccggagaaaaaccagccagctcctgcatcatcggtgcaaggaaagtgaacgcagtgaacacacctccataacccagagccgtaacggcatagatcagcagcaggcgcgggtgtgtcagaaccttaacctgatcgctcaggctggcgctcgcgcgccccggaatactggagggcaccagcagcaggctggctaccagagcaatcacgcccaacagcgataccgcgaggaaggtttctcgccagccaaaatgttgcccaataaacgttcctaacggtacgccggtgaccagcgcgacggttaagccgccaaacataatcgcaatggctgacgccgctttctcttttggcaccaggctggttgcaatcgtagaaccgatggagaagaagacaccgtgcgcgaggccagacagcaaacgggcaatgaccagggtagtgtagtccggagcctgccacgccagaatattgccggcggtgaagagcaccatcagggcaactaacagttgtttacgtggaaagcgtccagtcagtgcggtcagcacaggcgccccaacagcgacgcctaacgcgtaaatagataccagcagcccggcagaaggcagcgaaatggcgagttgttcagcaatagtgggaacaagtcctacaataacaaattcggtcgtgccaattgcgaaggcactgatcgtcagggcaagaagcgccagtggcataaatactccgtctcttcaggattaagatgacaggcagtatgcgccagtgtttaaataacaaaaatggttagaatctcaatagaattttgcggatgatgcaataatgaaagccacatcggaagaactgactatctttgttgccgttgttgaaagcggcagcttcagccgtgcggccgaacagctcgggcaggcgaactccgccatcagccgctcggtgaaaaagctggagatgaagctcggggtaagtctgctcaacagaacaacgcggcagctcagcctgacggaagaaggtgaacgttattttcgccgcgtacaatccgttttgcaggagatggcggcagctgagacggaaataatggagtcgcgtagcactccgcgtggattgctacgcattgatgcggcgacgccggtcgtgcttcattttctgatgccgttaatcaagccattccgggaacgttatccggagatgactctgtccctggtctcttcagagacgtttattaacctgattgagcgtaaagttgatgtggcgatccgcgcgggaaccctgacggattcaagtttacgcgctcgcccactgttcaccagctaccgcaaaattatcgcgtcaccgcaatatattgcagagcatggcaaaccggagaccgttgaggagctgaagcagcacctgtgcctgggctttacggaacctgtctcgctgaacacctggcccgtggcctgtcatgacggacaacttcatgagatcacttgcggactttcgtctaatagcggagaaacgctgaaacagctttgtcttgaaggaaatgggatcgcctgtttatcagactatatgattgataaggaaatagctgcgggtcagcttgtagaactgatggctgacaaacgcttacctgtagagatgccttttagcgcagtgtattacagtgacagagcggtaagtacgcgcatacgcgcttttatcgacttccttagcgaacatataaaaacagctcccggaggagctgtgtgagggtttaagggtacagaggaagggcttttattaatcccagtctggtgctaacccttccgggctgaccagacgatcgttgcattccagtgcagcgatcgcgtttttatcttcatcatcaagctggagatcccgcgctaacaggttacttgccaggttttcacgtttggttgaagacgggatcacggcatagccctcacccatcgcccatgccaggatcacctgtgcggctgtcgcattgtgtttttcagcgatgcgtgcaatcacttcatctttcagcgccttaccatatgccagcgtcatgtacgaggtgatgtgaataccatgctgtttcgcccagtccacgactttgtggttttgcaggtaaggagagagttcaatctgattggtggcaatattttctttacccactgcggcaatggccctttccatcaacgggatggtgaagttagagatgccaattttacgcgttaaaccctgctctttcgcttccagcagcgcctgcatgaactcctccacagagacggcatcgtcaggtgatggccagtggatcagcgtcagatcaacatagtcagtacgcagctttctcagactttccttcaggcttgggatcagcttgtcttggccgagattctcaatccagattttagtggtgatgaaaagttcgtcgcgcggtacgccactctcttcgatggcctggcctacggcagcttcgttatcataaatctgcgccgtatcaatagcacgatagcccaactcaagtgcggttttaacagatgcgataacaacgtcgtctttcaggcggaaagtgcccagacccagtgcagggatagtcatatgattcctcaatcgttatgttcataaactgaggagaattatcgctgtagttgttatgccgaaaaagatcgtgaaccgcagaggatttttgctaatttcgcaacaatcaaacgacagataagaaaaaagccctgagcgttagctcagggcttttaataagtggcggaacggacgggactcgaacccgcgaccccctgcgtgacaggcaggtattctaaccgactgaactaccgctccaccgaatacttctgtaaccaccggattaatgcaccggcttactacttaatcgatagcggcaaagaaggacatcacaaccatgttgaaactgtccgccagccctaccccggccatggcttctttaccgagccagctcaccagaaaggtgctcagcacccccattagcaggacgcaggtattctccaggaaaataggcacggcaaggggggtgatttcacgccagaacagaactcgatagctcttacgttttgcataccagggcgtgcgcataatcgcctggcgtaggggtgcggtgacgttcaaaatggaccttagcgagaaagttgaaactccatttcaaatgatggggcagaaatgcgtatcctgcaaagtattttccataaaattatgtttggatttacaacaaaatgacgacagaatcatcaaacaaacgcttttgcctgagatcaggtttgacaaaagttttttcgccgctaagataagcctccacaacgattcctctgtagttcagtcggtagaacggcggactgttaatccgtatgtcactggttcgagtccagtcagaggagccaaatttaaaaagcctgcttttagagcaggctttttgcttttctgcgttcgtgaaattgtcgggtggcggcttcgccttacccgacctacgtgataacagtcctgtaggcccggtaagcgcagcgccaccgggcaacagagtgtgcgattactcgcctttagcgtcgacgtttttgatttcgcccatcactttcagcttcttggagatgtcgcgacgctctttggacagctcagcgtttttgatgatgtagtcatcaacgcgatcttcataatcgctcttcatgctggcgatgatgccctgaatagcttcaacgctcatgccaggcttgatgtagtcgctcaggttgtccagcaacaggacacgtttctggttgtcacggatcttcttctctacgtcctggatttcgcgctgtagcttgtttttgcggcggaacaggcggacgaactccagaacatcctggaacgaaggcttggtagtttccatttttatacccctgataatgtgagattcggattcgttaaagcaaccgttttaacagacagcggctgcgaatgacaatgagtatatcgtttaaaaccatcataaccctaattgttgctgaatcgaagcagcaggcatcacatacgctttttatttgcgcagcgcccggcaaatcagctgcgataacaactccagctgtcgcgccagctccatactcagccagacatagccatggatgggcgtttccgccacattgtcgccctggcgctcattcatcagctgtttgagctcggtgacgatttcgttcagccgctcgctgttcgcccgtatcggctgtgggttaccttcatatagcgcatgggcgatggtcagcagggtttgttgcgtcatctgctgcgtctctttcagcgtatgcgcgttgagcatcagaagatggctggggcgtgaggcccagtgggcattgatttgcagttcaagcatacagaccagattacggctgaccgtctgaatagcttcaaaaatggctttctggatatgggtttctttgcttgccggggtaatcaacccgcgcattttgaccacatcattgaggattttttgcaggtgcttttccagccgcgggcgctcaatcagattcggcgaaaacccggcctggtagacccggttaaatgccgtgacgtagtttgccatctgaatgcgccagtgcaggaaggcgcgctgcggccagatgccggtaaacagcatggcgagcaacgagccgaggatcacgtccccgcttcgccacaatgcggtggtcatatcgcccgccggtgcgccgaccacaaccgcgagcgtaatgccaatcagcagcgcctgatacggtttcttgccaagggcaagccacccgcaaagaaacatcgccaccgcgcaccacagcaacatgaacggaaacgaaatcagctccagcttcagggcgataagcccaagcgctgagcctaaaacggtgccgcctatgcgttcgaaagcgcgctcccagtttttagcacaagtattttttagatctttttttccaactgatgattttccgttcttttcgctgaaaacccacccgatccgcttaaaaattgacgcattttgccttgcctcgatccaggaatacgatcaaagtcttctttaatagcgctcatctgtatcgaggtagatatgtttgcagtattacgtccttataaagatctgttcccccaaaaaggcgatcgcgtgatgatcgatgccagcagcgtggtcattggtgatgttcgcatggccgatgatgtcagcatctggccactcgtcgcgatccggggcgatgttaactacgttgcaatcggtgcacgcaccaatattcaggacggcagcgtgctgcatgtgactcataagtcatcttataaccctgagggcaatccgctcatcattggggaagatgtcaccgtcggtcataaagtgatgctccacggctgcacaatcggtaacagggttctcgttgggatgggatcgattttgctggatggcgtcatagtagaagatgacgtaatgattggcgcaggaagccttgttccgcaaaacaaacgtctggaaagtggctatctctatttaggcagtccggttaaacagatccgccccctaaaagaggcggagatcgaaggattgaaatactcagcgaacaattacgttaaatggaagaatgactatctggatcaggataaccagacccaaccctgatcgtcttcctgctgatcgcggatcaaatcgctggcttcctcttccagatcccagcgattttcgcaaaagaccgctaacggatctgaaccaccaaagcgctgatgcaacgtctcccctttaatcgcacaggtgagctgcattccatgcaccagcaccgggaaacaaaccgcttgcttattttcatcccagatttctctgtcgggaaaatgaatcgcctgattcatgccatcagttcctgtttcagcttttcgatcaccggttctacagcaggtaacacgccatgccagagtagcaccgcatgagccgcctgccccaccagcatgcccagaccatcagccacgtgttttgccccctgttgttcacaccaggtcagaaatggcgttttccctttttgataaaacatgtcataggcgtagatgtgggaatgaaccagggatgcaggaatcgccgggatctctccattaataccgcttgaggtggcattaatcacaagatcaaattcgtgacccgcgagatcgtcaagtgctaccgcagttacgctgcctgtgtgtgcgaacaacgccgccagctcttctgctctggagaaggtacggttggtgattgtcaccgcacaatccagcgaaagaagaggaagcaatacgccgcgcgacgcgccacccgcgccgatcagcaggatccgaaagcctggtttaataaacgacagtcgttccagatcgctgagtaaacctatgccatcggtgttatcgcccagaaggcgaccatcttcgagccgcttaagggtattgacggcaccagcgagcgaggcacgctcggtcagctcatccgcgcgcccgaaagcctcttctttaaaaggcaccgtgacgttcgcacctttaccacccgcatcaaaaaagctattcagcgtcggtataaatgcatcaacaggcgcaagaacccgaccatacgggtgatctatctgcaattgctctgcaaacagctgatggatcagaggcgacttgctgtgcgcgatcgggttaccaaaaacagcataggtttccataacattatccctggcgaaaacgttcgccggtcaaggcatcgcgaatttctgacgggttaagacgacccccggtttcacccacggctacagggaaatcattcccgaactgcgccagaacttcttctgttgtccgacaagggggaagcccggtcaggttggcgctggttgaaaccaggggtttaccaaatgcctggcataactccaccaccaagggatggtcggtaacgcgtaccgcgagtgaatcgaaacgcccggttaaccagcgcggcgttgtcggttgtgcagggaaaacaaacgtcacgggaccaggccacgcagagaaaatggtttcccgctgtgcaggcgtcagcatggaatcatcaatataaggcttaagctgctcgtagctcgcagcgatcaaaatcaatcctttttcgacaggccgctgttttagcgccagcagacggttaacggcgacttcgctgtcaggatcgcacccgaccccgaaaacggcttctgttggataggcgatgacttcttcttttttcaggatttccaccgcctgcgcgatggagcctgatggcaggttattattcactgatttgatccgccgaaaccggctttccacattgtttactggcgcaaaagcgtttcaagccttgcgcggttttcttttctataagtaacggataatcgcaatgagggcagacgcccgctactggtttgaaattgataacgaactggcattcaggatagcgatcgcacgaatggaaggtcttgccataacgagagcggcgctgcaccaattgaccacgctggcactgagggcaggcaattgccgtttcatctggtttatcaatttgttccgtatgttcacattccggatagcggctgcatccgataaacatcccgaaccgcccctgccgcagcgccagttcgccgccacagagtggacaaagctgtccctccagaattttgacgatatgtccgtccgcctggcttttcaggggacggacataatcacattccggatagtgtgaacaaccgagaaacggaccgtgtttcccggaccgaataacaagttcagccccacactgtgggcagggctcgtttttatgcaccgtgaagagtgctgatttggccataacaactcttgttgctgcacatagaattaatgcagcataccttcattcacttcaaagagtaattcttccatttgctgataggcattttcacagcctgggatgttgaacagaaccatcaggatcacccatttgagatcttccagttcaaattcagcagtatccagcgccatgacgcgctctatcaccatctctctcgtttcgaggtttagcacctgaatctgctcgaggaataaaatgaatccccggcagctggcatccagcctttcacactcttcagctgtatagatgcgcacagacaatgggtcagaagcaagctgcatcggttcggcgaggccgtcctgataatcagccaacttatccagccacatcaacgcattataaatatcttcccgctcaaaacctgcgtcggtcagatcccgtgttaatttgtcctgatccacctgcatttctgcttcgttgtggatgtaagtctcaaacaaatacatcagtacgtcgaacatggcatgccctccttaatcggacatagccgccgggtacagctgcgatccaccctgctaactccagttcgagtagctgtgctaccgttactggcacaggttggccggcacgttcagcgacaacgtcaacaggtgttacctcatctcctacgttagccaggagcttgggaaatggcaatgctactgcctcctgatccgatgaaatatgtcgcttttggagatcatcctgcaaccaatgcaatccatactgcaaattttccaggatatcctctttacaggtcaccagcgtcgccccctgttttatcagccagtgagggccttcgcagccagggttccccaacgggccgggtagcgcaaaaacttcacgcccctgctccagtgcgcaccttgcggtaaccagcgatccactccgaatcgcagcttcgaccaccagcacgccctggcttaacccactgatgatccggttacgccgtggaaagttacccggtctgggcgatgtcgaaagtgaaaactcagacactatcgccccctctgaagcgataagttgctcagccagaatgtgatgacgacgcggatagagactaaaaagaccattgccaagcacggcgacacttcgcccttttgctgacaacgccgcatgatgtgccacaccatcgatgccgcaagccaggccactggtgatcgtaaagccacattgggacagctgttcactcagcattttcccccaacgctcgccataccacgagggcgcacggctgcccacaaccgcaagctgcatgctattaagcacatcaacgcagcctcgcacaaagagcgccccgggaaaatcaggtatagaacgcagcaatggcgggaagcgaggatcatccgccgtgagaaggtggttgtcggtgtgttccagccattccagactacgttcaagctcactctcactgaacgaaaaaaactttacggcatgtttgggcaaaagccctgacgcgttgacagcttcagcatcgacggttgcctggcgaagcagcctctgcgcaatctccagcatcgcgtcaccgtataacgacccgatgtttataagccgtaaccatatctctgtggacgtcatctttttccctgccataagcagcctcagcaatctttgcgattggtcactgatgctgtcaatcgaccggggatttgtctagaatagaagtaatattcttatcaactcctgaacacgactctggaaatttatggcagttttgcaagtgttacatattcctgacgagcgccttcgcatcgtcgcggaaccggttaaagaagtgaatgcagaaattcagcgtatcgtcgatgatatgttcgataccatgtacgctgaagaaggcattggccttgccgcgacccaggtagacattcacaaacgtattattgtgatcgacgtttctgaaaatcgtgatgagcgcctggtgctgatcaaccctgagatgctggaaaaaagcggcgaaacaggtattgaggaaggctgtctgtctatccctgaacagcgcgctttggtgccacgtgccgaaaaagttaaaatccgtgcactggatcgtgacggcaatccgtttgagctggaagccgacgatctgctggcgatttgtattcagcatgagatggatcacctggtcggtaagctgtttatcgattacctctcaccgctgaagcaacagcgtattcgtcagaaagttgagaaactggatcgtttgcgttctcgcgcttaacgccccccggatacaaggaataacgtgtctacatcactacgtataatcttcgcgggtacccctgattttgcagcgcgtcatctcgacgcgctgctatcgtctggtcatcagattgttggcgtatttactcagccggatcgtccggctggccgcggtaaaaaactgatgcctggcccggttaaagtgctggcagaaacgcatggtttgccgcttttccagcctgcatcattacgacctcaggaaaaccagcagttagtggcagacctgaacgctgacgtgatggtagttgtggcttacggcctcattctgccgaaagcggtactcgatatgccccgcctgggctgtgttaacgttcatggttccttgctcccacgctggcgtggtgcagcccctattcagcgcgctctgtgggcaggcgatgctgaaactggcgtgacaatcatgaagatggacgtaggtttagacacgggcgacatgctgtataaactggcgtgtcccattaccgcagaagataccagcgccacgctgtatgacaagctggcggatctcggtccgcaggggctgattgagacgttgcaacagcttgctgacaatacagcgacacctgatgtgcaggatgaggcacaggtgacctatgctgaaaaactgagtaaagaagaagcccggatcgactggtccctgtcagcagctcaactcgaacgctgtatccgcgcctttaatccatggccgatgagctggttgatgattgatgagcagccagtgaaagtctggaaagcttcagttattaacggcaatacttcggcagagcccggtacgattatcgacgccagcaaaaacggtatccaggttgcgaccggagaagggatcctgaatcttgaatcgctgcaaccggccggtaaaaaggcaatgagcgcgcaggatctattaaattcccgtcgtgaatggttcatccctggcaatcgccttgcctgaacaaatttactcttaaggcccggtgtttccgggcatttttatttttacggttatgaaaagacaaaatctacgcactatggcggctcaggccgttgagcaggttatcgagcagggccagtcactgagtaatgtcctgcctccactgcaacaaaaggtttccgataaagacaaagcactgcttcaggagctgtgctttggcgtgctgcgcaccctctctcagcttgaatggttaattaataagctgatgtcacgcccgatgagcggcaagcagcgtaccgtgcattatttgatcatggtcggtttctaccagcttcttcatacccgcattccacctcatgctgcgctggctgagacagtggagggtgccgtttcgattaaacgtccccagctgaaaggattgattaatggcgtgctgcgtcagttccagcgtcagcaggacgaactgctggcagaatttgcgcaaagcgaagcgcgcttcctgcaccctgaatggctgctgaatcgccttaaaaaagcctacccacagcaatggcaagacattgctgatgccaataaccaacgtccgccgatgtggttacgcgtcaatcgtaaccatcatacccgcgacgcatggctggccctgctggaagaggccggaatgagcggcttcacacacgctgcttatcctgatgcggttcgtttagcctcccctgcactggtacatgcattacccggttttgaagagggctggctaacggtacaggacgcatccgctcagggctgcatgacctggcttgaaccgaaagacggggagcagatccttgatctctgtgcagcgccaggggggaaaacaacgcatattctggaagtggcgccgcaggccagcgtgatggccgtggatgttgatgagcagcgtctttcacgcgtctatgacaacctcaagcgtctgggtatgaaagctcaggttaagcaaggcgatggacgtaaacccgcagactggtgtggtgataccaggttcgatcgtattttgctggacgccccttgctcagcaactggcgtgattcgtcgtcatcccgatatcaaatggctgcgtcgcgatcgtgatatcaaggagcttgcccagttgcaatccgaaattctggatgccatctggccgcatctcaaacccggcggaaccctggtgtatgcaacctgctctgttctcccggaagagaacagtcagcaaattgcggctttcctgaaacgcaccccggacgctacgctgcatgatacgggaacacctgagcacccgggtctgcaaaacctgccgggcgcagaagagggtgatggtttcttttacgctaagctaatcaaagagtgatgttgagaacaggtcacgaaagatgaaaattatcattctgggcgcagggcaagttggcggaacgctggcggaaaatctcgtgggcgaaaacaacgatatcaccattgtggataccaatggcgatcgcctgcgcgttttgcaggacaagtttgatcttcgtgttgtacaggggcacggctctcacccacgtgtgcttcgggaggcgggcgcggacgatgccgacatgctggttgcagtaaccagttctgatgaaaccaacatggttgcatgtcaggtggcctactcgcttttcaacacaccgaaccgcatcgcccgcattcgctccccggactatgtccgggatgcggaaaagctgtttaattccgaagcagtacctatcgaccatcttattgcccctgaacagctggttatcgacagtatttatcgtctgattgagtacccgggcgcgttgcaggttgtgaactttgcggaaggaaaagtaagcctggcggtcgtgaaggcgtactacggcggcccgctgatcggtaatgccctgtcgacaatgcgcgagcatatgccacatatcgatacgcgtgttgcggcgattttccgtcacgacagacctattcgtccgcaagggtccaccattgtcgaagccggggatgaagtcttctttattgcggcttctcagcatatccgtgcggtgatgagtgaacttcagcgtctcgaaaaaccgtataagcgtattatgctggttggcggcggtaatattggcgcaggtctggcgagacggctggaaaaagactacagcgtgaagctgatcgaacgagatcaacagcgcgcgtcggagctggctgaaaagcttcagaatactatcgtgttttatggcgatgcttcggatcaggaattgctggccgaagagcatatcgatcaggttgatctttttattgccgtcaccaacgacgacgaagcgaatattatgtccgccatgctcgctaaacgtatgggggcgaaaaaagtaatggtgcttatccagcgtaaggcttatgtcgacctggtacagggtagcgtaattgatattgctatttcgcctcagcaagccaccatttctgccctgctaagccatgtacgtaaagcggatattgtcggcgtgtcgtctcttcgtcgtggtgttgctgaagccattgaagccgtcgctcatggggatgaaacgacgtcgcgcgttgttggtcgcgcgatcgacgaaattaaacttccaccaggcaccattatcggcgccgtagtgcgaggtaacgatgtcatgatcgccaatgataatttacgtattgagcagggtgaccacgttattatgttcctgaccgataaaaaatttattaccgacgtcgagcgtttattccagccaagcccgttcttcctgtaatgatttgggtgctcagacgagagcacccaaatattaaccttctaattttcatgccttttatttttcataacgattatttatccccaatggcaattagctaatcatttgttaaacttataggcgtcagctggcacaaggagaacataatgagttttattaaagagtttcgcgaatttgcgatgcgcgggaatgtggtggatttggctgtgggtgtcattattggtgcggcgttcggtaagatcgtttcatcattagtcgccgacattattatgccgccgttaggactgttgattggaggcattgatttcaaacagttcgccttcacccttcgggaggctcagggcgatatccctgcggttgtaatgcactatggcgtattcattcagaacgtatttgatttcgtgatcgtggcatttgccattttcatggcgatcaaacttatcaacagacttaaccgtaaaaaagaagaaccggctgctgccccgccagcaccaactaaagaagaagtcttactgactgaaattcgcgatctgttaaaagagcagaacaaccgcgtttaatcaggcgacagaaacagaaaggccagtggtaaaaaagcgattagcttgcttgccactggcctcccagttaccccgttgtgcatgtttacctttacgtagataactcccttttcctttcttgttcttctcaacacgctgtctgaaaagcgggtcgtgaagcaatgcctcaatggcgttatccttaatttgtcccttcgtatgctgatagcggctcatcatttctcctgagcatagttaatgtcggcgggagtctagtccctggctgataaaaaatcaacaaccctgagtttcactactggcgccctgttcaagagcttccagtattgagcaataaacactgctatgagcggtaccgcagcacgcgtcatttaacctttgcagagatcgctgcatggcttgcagctcctgaatgcgtccttcaacttcatccagccgggcctgaacgatgcttttagattcctgacacgtatgatgttcaggatcgatacggatcgacagcagttcacggatcgactccagcgtgaagccgagttgccgtgcatagcggataaaacgaaggcgttgcaggtcgttatccgtataaaggcgaaatccaccttccgttctgacctcatgatcgatcatctgctgcttttcgtagtagcggatagtatccggcgttacgttagcaagcttcgcaagttcacctatgcggtacatggctactcctcgtttattttttgcattaacctttcactgtactcaccatgcaaaaagttagtattcattcccgtctggcgcagttttagctcgatgagcgccaaccgacgactgatctcggagtaccgcgggtcattcttatgaatgcctttaagcagatcggcaagctcgacggcttcattgcgttgctgaagttcaggcggtaaacaacctgcgtttttcagtaagcgataaccggcccgtaattcaggggaaatatgtgaatcatcgtccagaatcagcggctcaccgctgccgggaagattttcgaactcacctttgttttgggcatcgcaaatatggcgttcagcccactgatcgagcaaccacataatgaactccaggggatgagcagaaaagatacagacattgtagataagtggagattctgcggatataaaaaaacccgccgaggcgggttttttacgttactacagattactctgcagcagcttctgctttctctgaacgatcaaccagctcgatgtaagccatcggcgcgttgtcgcctgcacggaagccacacttcagaatgcgagtgtaaccaccggcacggctcgcgaaacgcgggcccagttcgttaaacagttttgccacgatctcgttatcacgagtacgggcgaatgccagacgacgattagcaacgctgtcagtcttggcaagagtaatcagcggctcaactacgcgacgcagctctttcgctttaggcagggtcgtcttgatgatttcatgacgaaccagtgaacctgccatgttgcggaacatagcctggcgatggctgctgttgcggttcagttgacgaccactcttacgatggcgcatgaccttatccttctcagtaaaaccttaacctgtgatccggttactcgtcagcaatgcttgccggtggccagttttccaggcgcatgcccagagacagaccacgtgaagccagcacgtctttaatctcggtaagagattttttacccaggttcggcgttttcagcaactcaacctcggtacgctgtaccagatcaccgatatagtggatagcttctgccttgaggcagttagcagagcggacagtcaattccagatcgtcaacagggcgcagcaggatcggatcgaattctggtttctcttctttcacttccggctgacgtacatcacgtaagtcaacgaaagcttccagttgttctgccaggatggttgccgcacgacgaatcgcctcttcaggatcgattgtgccattggtttccatttcgatgaccagcttgtccaggtcggtacgctgttctacacgcgctgcttcaacattgtaggcaatacgctctacagggctgtaacatgcgtcgaccagcagacggccgattgggcgctcatcttcttccgaatgaattcgggcagaagccggcacataaccacgaccgcgctgaactttgatacgcatgctaatagctgcgttctcatcggtcaggtggcagatcacgtgctgcggcttgacgatttcaacatcaccgtcgtgggtgatgtcggctgcagtcacagggccaatgccagatttattcagagtaagaataacttcatctttaccctgaactctcaccgccagccctttcaggttgagcaggatttcaaggatatcttcctgaacgccttctttggtgctgtactcatgaagtacaccatcaatctcaacctcggtcaccgcgcaacccggcatcgatgagagcagaatacggcgcagtgcgttacccagagtatggccaaagccacgctctaaaggctcaagggtcaccttggcgtgcgtcgaactcacttgctcgatatctaccaggcgcggttttagaaactctgtcacagaaccctgcattgtgtcctctctttggtactaagctttacttggagtaaagctcgacgatcaggtgttcgttaatgtccgcagacagatcagaacgttctggctgacgcttgaacgtaccttccatcttgccagcatcaacttccagccaggttggcttttcacgctgctcagccagctccagagcggctttcacgcgagattgctttttcgctttctcacgaatgctaacaacgtcattcgctttaacctgataagaagcgatgttaacaacacgaccgtttaccatgattgctttatggctaaccagctggcgtgattcagcacgagtcgcgccgaagcccatacggtatacaacgttgtccagacgaccttccagcagagccagcaggttttcacctgtgttgcctttcagacgtgctgcttctttatagtagttacggaactgacgctccagcacaccgtagatacggcgaactttttgcttttcacgcaactgcacaccatagtcagacagacgcggtttacgcgcaccgtgctggccaggagcttgttcaattttacacttggtatcgatcgcgcgaacgccagacttaaggaataagtcggtgccctcacgacggctcagcttgagcttaggacccaaatatcttgccattttctatctccaactaacctaaaaaacgagcgttatacgcgacgttttttcggcggacgacaaccgttatgagggatcggagtcacatcagtaatattcgtgatgcggaaaccagcggcgttcagagcgcgaacagtagattcacgacccggacccggacctttaaccataacttccagattcttgatgccgtattcttttacggcttcagcgcaacgctctgctgcaacctgagctgcgaacggagtggatttgcgagaaccacggaaaccggaaccaccggctgttgcccaacccaatgcgttaccctgacgatcagtaatagtaacgatggtgttgttgaaagaagcatggatatgagccacgccgtcagagacttgttttcttacacgtttacgtgcacgaactggtgcctttgccattattcaatcaccccgattatttcttgatcggtttgcgcggacccttacgggtacgtgcgttggtcttagtacgctgaccgcgcactggcagaccacgacgatgacgcaaaccgcgatagcaaccaagatccatcaggcgcttgatgctcatgctgatttcacggcgcagatcaccttcaacgacaaatttggcaacttcgtcacgcagcgtgtcgatttgttcttcagacagctcactgatcttaacatcttcagcgatacccgctgcagccagaatggctttagaacgggtcttgccgacgccatagatcgaagttaatgcgatcacagcatgtttctgatcaggaatgttaatgcctgctatacgggccactatgcactcctactatttaatatgtacgcaccatgctgaaaagcccgttttcaggatactcaaatggaaacgtacagacatacaaaagattggctggctaatctagccagctcaacccaactttgcaagaaaaatatgcgaaataatcagccttggcgctgtttatgcttcggctcggcactgcaaatcacacggatgacaccatcacgcttaacgattttgcagttacggcataatttcttgacggaagcacgaactttcatttttactctccgtaacttctcaggcgaccagttagcggccgtagcctttcaggttcgccttcttcaatgcagactcatactgactggacatcatcagagtttgcacttgagccataaagtccataatcacgaccacaacgataagcagtgaggtcccaccgaagtagaacggtactttcattgcatcacgcatgaactccgggatcaggcagataaaagtaatataaagcgcaccaaccaaagtcaggcgagtcattactttatcgatatacttcgccgtttgctctcccggacgaattcctggtacaaatgcaccggacttcttcaggttatctgctgtttcacgcgggttgaagaccaacgccgtgtagaagaaacagaagaagatgatcgcagacgcatagagtaacacataaagtggttgcccaggctgcaaatacagcgaaattgttgtcagccagttccaaccagtaccgcccccgaaccatgacgcgatggttgccgggaacagaataatactggaagcgaagatagccgggataacccccgccatattcactttcagcggtaaatgtgtgctctgtgcagcatagacacgacgaccctgctgacgtttagcgtagttcaccacaatgcggcgttgaccacgttcaacgaagacaacaaagaacgtcactgcaaatactaatactgcaaccaacagcaacaggaggaagtgcaggtcgccttgacgcgcttgctcgatagtatgggcgatggccggcgggagacccgcaacgataccggcgaagataatgattgagataccgttaccgatacctcgttcagtaatctgttcgccgagccacatcaggaacatggtccctgtgaccagacttacaacagcggtgaaatagaatgcaaagcctgggtttaataccagaccttgcataccaggcatattcggaagaccggtagcaataccgatcgactggaatattgccagcaccagagtgccgtaacgggtgtactggctaatcttacgacgtccagactccccttctttcttcaactctgccagggccggatgaacgaccgtcagcagctggataataatcgatgccgaaatgtacggcataatacccagtgcgaaaatagaagcacggctgagagcaccaccagagaacatgttgaacatttcaatgatggtgcctcgctgttgctcaagcagtttggcaagtacagcggcatcaataccagggatcggaataaaagagccaatacggaacacaatcagcgcgccgattacaaacagcagtctgcgtttcagctcgccaaatccacctttggcactttgaaaatctaatcccggttgcttagccatctgctacttattcctcaattttaccgccagcagcttcgatagcagcacgagcacctttagtaacacgcaggccacgaacagttaccggagtagaaacttcaccagccaggatcactttcgcgaactcgatctggataccgataatgttagccgctttcagcgtgttcaggtctacaacgccgccttcaactttcgccaggtcagacagacggatttccgctgtgatcgctgctttgcgagaggtgaagccgaacttcggcagacgacggtacagtggcatctggccaccctcgaaaccgcgacgtacgccaccgccagaacgagagttctgacctttgtgaccacgaccaccggttttgccgaggccagaaccgataccacgacccaggcgtttacccgcctttttagagccttcggccggagacagagtatttaaacgcatctcttactcctcaactttaaccatgaagtaaaccgcgttgaccataccacgaacagcaggagtatcctcgcgctcaacggtatgaccaatacgacgcagacccaggccaagcagcgttgccttgtgtttcggcagacgaccgattgcactgcgggtttgagtgattttaatagtctttgccatggtcaattaccccagaatttcttcaacggatttaccacgcttggcagcgaccatttctggagaattcatattttccaggccatcaatagttgcacgaaccacgttgatcgggttggtggaaccatatgctttagccagaacgttatgaactccagcaacttccagaacggcgcgcattgcaccaccggcgatgataccggtaccttcggaagctggctgcatgaatacacgagaacccgtgtgaacacctttaactgggtgttgcagggtaccgttgttcagcgcgacgttaatcatattgcgacgggctttttccatcgctttctggatcgctgctggaacttcacgcgctttaccgtaaccaaaaccaacgcgaccgttaccatcacccactacagtcagagctgtgaaggagaaaatacgaccacctttaacggttttagatacgcggtttaccgcgatcagcttttcctgcagttcgccagcctgtttttcgatgtgagccatcttacacctctaccttagaactgaaggccagcttcacgggcagcatctgccagtgcctggacacgaccatgatattggaacccggaacggtcaaaggaaacattgctgatgcctttttccagagcgcgttcagcgacagctttacctacagctgctgcggcgtctttgttaccggtatacttcaattgttctgagatagctttttctacagtagaagcagctaccagaacttcagaaccgttcggtgcaattacctgtgcgtaaatatgacgcggggtacgatgtaccaccaggcgagttgcacccagctctttgagcttgcggcgtgcgcgggtcgcacgacggatacgagcagatttcttatccatagtgttaccttacttcttcttagcctctttggtacgcacgacttcgtcggcgtaacgaacacccttgcctttataaggctcaggacgacggtaggcgcgcagatctgctgcaacctgaccgatcagctgtttatcagcgcctttcagcacgatttcagtctgagtcgggcattctgcagtgataccggccggcagcggatgctcaacagggtgtgagaagcccagagacaggcctactgcattccctttgatagctgcacgataacctacaccaaccagctgaagctttttagtgaagccttcggtaacaccaacaaccattgagttcagcagggcacgcgcggtaccagcctgagcccatccatccacgaaaccatcacgtggaccgaaggtcagagcgttatctgcatgtttaacttcaacagcattgttgagggtacgagtcagctcgccgtttttacctttgatcgtaataacctgaccgtcgatttttacatcaacgccggcaggaataacgaccggtgctttagcaacacgagacattctttcctccgattaggctacgtagcagataatttcgccaccaagaccagcctggcgcgctgcacgatcagtcataacacctttagaggtagaaacaactgcgataccaagaccagccattacttttggcagctcatcttttttcttatagatgcgcaggcctgggcggctgacacgctgaatgctttctacaacagctttaccctggaaatacttgagagtaagttccagttccggcttggtgtcgccttcaactttaaaatcttcgataaaaccttcttccttcagcacgttggcaattgccactttcagcttggcggaaggcatggtgaccgcaactttgttcgcggcctgaccgttacggatacgggtcagcatatccgcgatcggatcttgcatgctcatctgtctttactcccgtgattcaattggtaattaccagctagcctttttcaagcctggcacttcaccgcgcatggcggcttcacgcagtttgatacggctcaacccaaacttgcccacataaccatgtggacgacctgtttgacgacagcggttacgctgacgagacgggctggaatcacgcggcagagactgcagcttgagaaccgcattccaacgatcttcgtcggaagcgttcacatcagaaatgatcgctttcagttcagcgcgtttagcgaagaatttatcagctaaagctacgcgctttacttcgcgtgctttcattgattgcttagccattcagtaaccctaccttacttgcggaacgggaagtcaaaggcagccagcagagcacggccttcttcatcagatttcgcagtagtggtaatggtaatatccaaaccacgcacgcggtcgactttatcgtagtcgatttctgggaagatgatctgctcacggacacccatgctgtagttaccacgaccgtcgaaagacttagcggacaagccacggaagtcacggatacgtggaacagcaatagtgatcaggcgctcaaggaactcccacatgcgttcgccacgcagagttactttacagccgatcggatagccctgacggattttgaagcctgcaacagatttgcgtgctttggtgatcagcggtttttgaccggagattgctgtcaggtcagctgctgcgttatccagcagtttcttgtcagcgatcgcttcaccaacacccatgttcagggtgatcttctcgacccgagggacttgcatgacagaattgtagttaaactcagtcatgagtttgttaactacttcgtctttgtagtaatcatgcagtttcgccatcgtactactccaaattacttgatagtttcgctgttagatttgaagaaacggacttttttaccgtcttcgaatctaaagcctacacggtcagccttgccggtagccgcattgaagattgcaacgttagaaacctgaatagcagcttctttttcaacgatgccgcctggttggttcagggccggaaccggcttctgatgtttcttaaccaggttgataccttcaacgacaagtttgccggaagacagaacattttttactttaccgcgtttacctttatctttaccggttaacacgataacttcgtcatcacgacggattttcgctgccatgattcgctccttagagtacttctggtgccagagagataattttcatgaacttctcagtacgaagttcacgagttaccggcccaaagatacgcgtgccgataggctgctcgctgttattgtttaaaataacgcatgcattaccatcgaagcgaatgacagaaccgtcagggcgacgaacacccttcttggtgcgcaccactaccgccttcagcacatcaccttttttgaccttaccacgtggaattgcttccttgatggtgatcttgatgatgtcgcctacgcctgcgtagcgacggtgcgagccacccagaaccttgatacacattacgcgacgtgcaccggagttgtcggcgacgttcagcatagtctgttcttggatcattttagtgctccgctaatgtcaactactacctgagactctaaaatcagagccgttaaaaagccccatatcgagggcgcggcattataacaccgcttctgcaatatgggtagaaaaaataaacggctcatcgctgagccgtttattcgtattgagaatgcgtactctattacagaaccgctttctctacaacgcgaaccagcgtccaggacttagtcttggacagtggacggcattcacggatttccaccttgtcgccgataccacattcgttgttctcgtcatgtacgtgcagtttggtcgtacgcttgatgaatttaccgtagatcgggtgtttcacaaaacgttcgatagctacaacaatggatttctccattttatcgctaacaacacgaccttgcagagtacggattttatcggtcattacgcacccgccttctgagtcagtaaagtcttaacgcgcgcaacattgcgacgcacttgcttcagcaggtgagtctgttgcagctggccacttgcagcctgcatacgcaggttgaactgctcacgcagcaggttcagcagctcagcgttcagctcttcaacgcttttttcacgcagctcttttgctttcattacatcaccgtcttagttacaaaggtggttttgataggcagtttcgctgctgccaggccgaaggcttcacgggccagctcttccggaacaccgtccatttcataaaggactttgcccggttggatcaaggcaacccagtactccacgttacctttacctttacccatacgaacttccagtggcttctcggtgatcggtttgtccgggaatacacggatccagatcttaccttgacgcttaactgcacgggtcattgcacgacgtgctgcttcgatctgacgtgcagtcagacgaccacggccaacagctttcagaccgaaagtgccgaagctaacatccgtaccctgcgccagaccacggttgcggcctttgtgcactttacggaattttgtacgctttggttgtaacatcagcgacgctccttatttacggcctttacgctgctgctttttaggttgagcagccggtttttccggttgttcaacagcagccataccacccaggatctcacctttgaagatccataccttaacgccgattacaccgtaagtggtgtgcgcttcagaggtgttgtagtcgatgtcagcacgcagagtgtgcagcggtacgcgaccttcgcggtaccattcggtacgtgcgatttccgcgccgcccagacggccgctaacttcaactttgatacctttagcgcccagacgcattgcgttctgtacagcacgcttcatagcacgacggaacataacacgacgttccagctgagaagtgatgctgtcagcaaccaatttagcgtccagttcaggcttacgaacttcagcgatattgatctgtgcaggaacgccagcgatatccgctacgaccttgcgcagtttttctacgtcttcgcctttcttaccgataacgatgccagggcgagcagtgtgaatagtcacacggatgctcttagctggacgctcgataacgatacgagatacagacgctttagccagttccttagtcaggtactgacgtactttaaaatcgctgtccaggttgtcagcgaattctttggtgttcgcaaaccaggtagagttccatggttttacaatacccaggcgaataccattaggatgtactttctgacccattgctagtctccagagtctcagcgatcggacacaaccacagtaatgtggctggtgcgcttcaggatgcgatctgcacgacctttcgcacgcggcataatgcgcttcatgcttgggccttcatctacgaaaattttcgcgactttcagatcgtcgatgtcagcgccatcgttgtgttcagcgttagcaatggcagattccagtactttcttgaccaataccgcagctttcttgttggtataggtcaggatgtccagggcctgcgacactttcttaccgcgaatcaggtcagcaacaaggcgaaccttctgtgcagaagaacgagcatggcgatgttgagctaaagtttccatctcttcctcctaccttatttcttcttcgcttttttatcagcagcgtggccgcgataagtacgagtcggtgcgaattcacccagtttgtgaccaaccatttcgtcggtaacaaagactggaacgtgctgacgaccattatggacagcgatggtcaaaccgatcatgttaggaaagatcgttgaacgacgggaccaagtgcgcaggggcttcttgtctccgctttccaccgctttctctaccttcttcagcaagtgcaggtcaataaaaggacctttcttgagagaacgtggcatggcttatcctctaaaattatttgctacggcgacgtacgataaatttatcagtacgcttgttgctgcgggtcttcttacctttggtctgaacgccccacggagttaccgggtgcttaccaaagttacgaccttcaccaccaccatgtgggtggtcgactgggttcatcgcagtaccgcgaacggtaggacgaacaccacgccagcgtgcagcaccagctttacccagaacgcgcagcatatgctcagcattgccaacttcgcccagagtagcgcggcagtctgcttcgactttacgcatttcaccagaacgcagacgcagggtgacataagcaccgtcacgcgcaacgatctgaacgtaagtacccgcggaacgcgccagctgaccgcctttacctggtttcatttctacgttatgaacggtagaaccaaccgggatattgcgcatcggcagggtgttgcctgctttgattgcagcatcaacgccagactgaatctggtcgccagctttcaggcctttaggggccaggatgtaacggcgttcgccatctttgtacagaaccagcgcgatgttcgcggaacggttcggatcgtactcaagacgctcaacaactgctgggataccgtctttgttgcgtttgaagtcaacaatacgataagcctgcttgtggccaccaccgatgtgacgagtggtgatacggccattgttgttacgaccaccggatttgctgtttttttccagcaacggagcaaaaggtttgcccttgtgcagctcagggttaaccactttaactacgtggcgacgacccggagatgtcggtttacatttaacaactgccattgtattactcctccgacttactcagcgccgccaacgaagtccaggttctggccttctttcagggtgacgtaagcttttttccagtcgctacgacgaccgatacgctgtccgtgacgtttaactttccctttaactaccagggtgttaacgacttcgacttcgacttcaaacagtttctgcacagcagctttgatctctgctttggtcgcgtctttagcaactttgagaacgatggtgtttgttttttccatcgcagtagacgctttttcagaaacgtgcggtgcgcgcagcaccttcagcagacgttcttcacgaatcatgccagcatctcctcaacttgcttaacagcatcagcagtcattacgactttgtcgaaggcgatcaggctaaccgggtcgataccagtcgcgtcgcgtacgtcaaccttgtgcaggttacgcgcggccaggaacaggttctcgtccagctcaccggtgatgatcagcacatcttccagagccatgtctttcagtttctgtgccagcagcttagttttaggcgcttcaacagagaacttctcgacaacgatcagacgatcctgacgtaccagttcggacagaatgcttttcagcgcgccgcggtacatctttttgttaactttttgactgtggtcctgcggacgcgcagcgaaggtcacgccacctgaacgccagatcgggctcttgatagaacctgaacgcgcacggccggtacctttctggcgccatggctttttgcctgaaccagttacttcagcacgagtcttctgagcacgagtaccctgacgagcaccagctgcataagcaacaacaacctggtgaaccagcgcttcgttgaaatcacgaccgaaggtagtttcggaaacagtcagcgcgctctgcgcgtctttcaatactaattccattgctatccccttacgccttcacagctggtttaacgatcaggtcgctaccggttgcacccgggaccgcacctttaaccagcagcaggttgcgctcagcgtcaacacgtactacgtccaggctctgaacggttacacgttcgttgcccagctgacctgccattttcttgcctttgaacactttgcccggagtctggttctgaccgatagaacccggaacgcggtgagacaaggagttaccgtgagtagcgtcctgggtacggaagttccagcgcttaacggtaccagcaaaacctttacctttagaggtaccggttacgtcaacttttttaacgtcagcaaacagctcaacgctaatgtcctgacctacggtgaactcttcgccttcagcaagacggaattcccacagaccacggccagcttcaacgccagctttagcgaagtgacccgcttctggtttggttacacggttagcttttttagcaccagtggtaacctgaatagcgcggtagccatcgttagccagatctttaacctgagtaacgcggtttgcttcaacttcgattacggttactgggatagaaacgccatcttcagtgaagatgcgggtcatacccacttttttaccgactaaaccaatcattgtttcaacctctcaatcgctcgatgacctgattaacccaggctgatctgcacgtctacaccggcagccagatccagacgcatcagagcatcaacggttttctcagttggctcaacgatgtcaaccagacgcttgtgagtgcggatttcgtactgatcacgcgcatctttgttaacgtgcggagagatcagaacggtaaagcgctctttgcgggtcggcagcgggatcggaccacggacttgcgcaccagtgcgcttagcagtctcgacgatttccgcggttgattgatcgatcagacgatgatcaaacgctttaaggcggatacggattctttggttctgcatgagaccagagctccaattattttataaacgaaaatgattactcctcaaacccattacgattgatgggagagtgtaaccgttcttacgtagctccccaattgggagcattgttgagtaacaaagtgagctactctggttcagattgaacccgccgtcaattacgacaagcccgcgcattatacgtaaatcagagaaagacgcaagtgccgtttagaaattaagcgccaaagacgtactatacgtaaggccgcgcaattttttatgcaaagtatcccttctcaactctttgtctgaagccgctacgcaattgctgtttttacacattgccgggaatgcagattattacgagtatgcgctcaaaccattttgaggctctcgctatgctactgtccctcccctttctgctgatctattttgcgttatcggccttgcttgttcgcaccgatattcgcacggggcttcttcccgataaatttctttgcccgctgctatggacgggcctgctctaccagctttgtctccatcctgattttttgccgagcgcggtagtgggtgcgatggcaggatacgccggattcgccattatctattggggataccgtctcatctgccgacgtgaagggatgggatatggcgacataaaatatctggcggcgctgggggcatggcatggctggtgtgtactaccaatacttgcattagtggccgcgttaatggctctgctgtatctggttgctttctcgttatttacccctgataagcaggcattaaaaaacccactgccttttgggccatttctggcggcagcgggtttatgcgttggctgggaaagcctgattaactttccactttgatctgagactgaaggtagttctgtaggccaattttgctaatgagatccagttcggtctcaagccagtcgatgtgcccttcttcatcggccaggatctggatcatcatatcgcggctgacgtagtcatgtacgctgtccgcataggcaatggcttcacgcagatcttttgcaccctccagctccagccggagatcagaacgcagcatctcttcgacatcttctccgatgcccagttttccgagatcctgtaggttaggaatgccttcgaggaataaaatacgctcaatgtatttatcggcgtgtttcatttcatcaatggactcatggtattcaacatcgttgaggcgagtcagtccccagtttttaaacattcttgcatggagaaaatactgattgattgcgacaagctcatttcccaataatttattgagataacttatgattttaacatcacctttcattatatagtccctccgcttccactcattgaagcgtagatcgggctacggggatgtcaaaaaaaagatagaggcttacgcgatctctttgaattccgggatctgcatcagttcgtcctgcatgatctcacgcgctgcgcgaacgcatttaccgcattgatttcccaccggaacaaacttgcgaagctgctggaaagattgtggttgaaactggcgaacggcctgacgaatttttttgtcgcttacaccattacataaacaaacgtacataaagactcccgttcaaaatatgcgcaaagtgtaagtgagaatggttatgattacaatagcgcgggcgtcggaatacgtggcgggagaaagcaaaaaatgcgaatttttatgacaatgccccaacggcagaaaacaaaaaaggacgccggagcgtcctttttatttcagggataattaattagcccnnnnnnnnnnnnnnnnnnnnnnnnnnnnnnnnnnnnnnnnnnnnnnnnnnnnnnnnnnnnnnnnnnnnnnnnnnnnnnnnnnnnnnnnnnnnnnnnnnnnnnnnnnnnnnnnnnnnnnnnnnnnnnnnnnnnnnnnnnnnnnnnnnnnnnnnnnnnnnnnnnnnnnnnnnnnnnnnnnnnnnnnnnnnnnnnnnnnnnnnnnnnnnnnnnnnnnnnnnnnnnnnnnnnnnnnnnnnnnnnnnnnnnnnnnnnnnnnnnnnnnnnnnnnnnnnnnnnnnnnnnnnnnnnnnnnnnnnnnnnnnnnnnnnnnnnnnnnnnnnnnnnnnnnnnnnnnnnnnnnnnnnnnnnnnnnnnnnnnnnnnnnnnnnnnnnnnnnnnnnnnnnnnnnnnnnnnnnnnnnnnnnnnnnnnnnnnnnnnnnnnnnnnnnnnnnnnnnnnnnnnnnnnnnnnnnnnnnnnnnnnnnnnnnnnnnnnnnnnnnnnnnnnnnnnnnnnnnnnnnnnnnnnnnnnnnnnnnnnnnnnnnnnnnnnnnnnnnnnnnnnnnnnnnnnnnnnnnnnnnnnnnnnnnnnnnnnnnnnnnnnnnnnnnnnnnnnnnnnnnnnnnnnnnnnnnnnnnnnnnnnnnnnnnnnnnnnnnnnnnnnnnnnnnnnnnnnnnnnnnnnnnnnnnnnnnnnnnnnnnnnnnnnnnnnnnnnnnnnnnnnnnnnnnnnnnnnnnnnnnnnnnnnnnnnnnnnnnnnnnnnnnnnnnnnnnnnnnnnnnnnnnnnnnnnnnnnnnnnnnnnnnnnnnnnnnnnnnnnnnnnnnnnnnnnnnnnnnnnnnnnnnnnnnnnnnnnnnnnnnnnnnnnnnnnnnnnnnnnnnnnnnnnnnnnnnnnnnnnnnnnnnnnnnnnnnnnnnnnnnnnnnnnnnnnnnnnnnnnnnnnggtgattgcagcagtcagggtagttttaccatggtcaacgtggccgatagtaccaacgttgacgtgcggttttgtacgttcaaatttttctttagacacggctatattccttactatagtgctctccccttcggagagagcacgggacttaggttttaatcctgtggattacttaccacgggcttcgataacggcctgagcaacgttgttcggcgcatcatcatacttcaggaattccatagtgtatgatgcacgacctttggtcagagaacgcagctgagttgcatatccgaacatttcagacagcggaacttcagcgtggatcttaacgccagttacttcggattcctgaccacgcagcataccgcgacgacggctcaagtcaccgataacgtcaccggtgttctcttcaggagtttctacttcaaccttcatgatcggctcaagcagaactggttttgctttcttaaagccttctttaaaggcaatagacgcagccagtttaaacgccagttcagaggagtcaacgtcgtggtaagaaccgaagtgcagacgaacacccatgtctacaaccgggtaaccagccagaggaccagctttcagctgctcctggatgcctttatcaacggcagggatgtattcgccaggaattacaccacctttgatgtcgttgatgaactcgtaacctttagggttagagcccggctccagtgggtacatgtcgatcacaacgtgaccgtactgaccgcgaccaccagactgcttagcgtgtttaccttcaacatcggtaactttcgcgcgaatcgcttcgcggtaagcaacctgaggtttacccacgttcgcttcaacgttgaattcacgcttcatacggtcaacgatgatgtccaggtgcagttcacccataccagcgatgatggtctggttagattcttcatcagtccatacgcggaatgatgggtcttctttcgccagacggcccagagccagacccattttttcctggtcagctttggtttttggttcaactgcgatggagattaccggctcagggaattccatacgctccagaatgatcgggtgatccgggtcacacagggtgtcaccagtggtcacgtctttcagaccgatagcagcagcgatgtcgcccgcacgaacttctttgatctcttcacgtttgttagcgtgcatctgtacgatacggccaaaacgttcacgcgccgctttcacggagttcaggatggtgtcaccggagttaaccacaccagagtaaacgcggaagaaggtcaggttacccacgaatgggtcggtagcaattttgaacgccagtgcagagaacggctcgtcatcacttgcgtgacgctcagccggagtatctttaccgtcgtccaggatgccgttgatcgcaggaacgtcaaccggggatggcaggtagtcaactaccgcatccagcatcgcctgaacacctttgttcttgaacgcagaaccacaggttaccaggatgatttcgttgttcagaacgcgctgacgcagagcagatttgatctcttgctcagacagttcttcaccacccaggtatttctccatcagctcttcagaagcttctgctgcggattcgatcaggttctggtgccattcgtcagccaggtcctgcatctctgccgggatatcttcgtattcgaaggtaacgcccgcatctgcttcgttccagttgatggctttcattttcaccaggtcgataacgccggtgaaaccttcttcagcaccaattgccagctgaagcggaacagggttcgcgcccagacgggttttgatctggccaacaactttcaggaagttagcacccatacggtccattttgttaacgaacgcgatgcgtggaactttatatttgtttgcctgacgccatacggtttcagactgtggctgaacaccaccaactgcgcaataaaccattaccgcgccgtcaagaacacgcatggaacgttctacttcgatggtgaagtcaacgtgccctggggtgtcgatgatgtttacgcgatgcggttcgtactgcttagccatacctgaccagaatgcagtagtcgctgcggaggtgatagtaataccacgctcctgctcctgttccatccagtccatggtggctgcgccgtcatgaacttcaccgattttatggtttacaccggtgtagaacagaatacgttcggtagtagtggttttaccggcgtcgatgtgcgcactgataccgatgttacggtagcgtgcgatgggtgttgtacgagccatttgattcctcgtttatatctttaggcgttcagttaagttacccagagcgggcggcttctctgaagcgcccgcctggtgactacgactccgaagggattaccaacggtagtgtgcgaacgccttgttggcttctgccatacggtgaacgtcttcacgtttcttaactgcggtacctttgttttccgcagcatcagaaagttcgttcgccagacgcagagccatggatttatcaccgcgtttacgagcagcttcaacgatccaacgcattgccagagcattacgacgaaccggacgaacttcaactggaacctgataagtagaaccaccaacgcggcgagacttaacttctacagtcgggcgcacgttgtcgagagcgacttcgaaggcttccagttcatttttaccagaacgctgagccagggtctccagcgcgctgtatacgattgcttctgcggtagattttttaccatctaccatcaggatatttacaaattttgccagcagttctgatccgaatttcggatctggaagaattttacgctgaccaatgacgcgacgacgtggcatgggattactccgttgttaattcaggattgtccaaaactctacgagtttagtttgacattaagataaatcagtttggccttacttaacggagaaccattaagccttaggacgcttcacgccgtacttggagcgagcctgcttacggtctttaacacctgagcagtccagcgcaccacgaacagtgtggtaacgaacacccggaaggtctttaacacgaccgccacggatcaggatcacggagtgctcctgaaggttgtgaccttcaccaccgatgtaggaagtcacttcgaaaccgttagtcaaacgcacacggcatactttacgcagtgcggagtttggttttttaggagtggtggtatatacacgagtacatacgccacgtttctgcgggcaggcttccagcgcaggcacgttgctttttgcaactttgcgtgcacgtggtttgcgtaccagctggttaactgttgccattaaatagctcctggttttagcttttgcttcgtaaacacgtaataaaacgacctcatacaatatgaggacgcgaaattttagggctacgtcgaaaaggtgtcaagaaatatacagcgatctcaaatcaccagttcatttgactggcgtgcgtcacagtaagattgacgaaatcagtatagccaaccacgtcaattttggctgaaatttgaccagaaagaccccgcgcatccagatcctctttcagcgcagagactgttatgggggcattagcgaggatttcaacaaaacggctgccttcaagcgccgcaagcacgccatcctgaatcagcagcagatcatcaccttcgcgcagcatgctcagtaacgtgtcgatatcgcattgccacggtgaacggctcagggtatggagcatgacagcctcagaaagtcagaacggtatcgtagtgagagagttgttcgcgcagcgcagcagatgtcaggatcgtcacgtccagcacgaacggtgttttctcgtttaacccacgcgcggccagcgagtcggcgcacacatagaaggtttcaatgtcatagagcggcagaactttaaaggtcgcaatgtagtcgcgcgcaagaatggcctgcggttgttggcctgccagaagctggaatacgccatcgcctaaaaagaagacgccgatatcttcggttaaagccgatgtcgcgagcaatgcatccagcccttcccggcctgaagcgctgccatgcggcgcagaagtaaaaacaaacgctacgcgcttcatcaaaattgcaccactctgtcgcaggtcaacgccgcctgtgccagggcacccagtccgctgagcgaaaagcccggttgcaggttagcccccgccagaccaaggcgttcggcttcggtcacatccgtcacgccgcgacgcagtgccgccgcgacgcagatatgcaggtcaacgccctgcgtttcgtttaatttttgccaggcgcgcacgaggtcaaactcatcgctcgccggagacgtaaactggttcgcgttatatacgccttcgcgataaaagaagacgcttgccagttcatgaccggcatcaagcagcgcatgggcaaactgtagcgcgctgctggcctgctgggtaccgtacgccgggcccgtcaccattaacgcaaaacgcattacttgtcttgtcccaggaagtcgccgcttttgaactggcgaatatagaggtaaaccgtgtgtttggagatattcaggcgatcggccacctggttgatggcatctttgatatcaaaaatccctttctcatagaggttcaggacgatctgacgattcttggcgttgttggatacgttgcgatcggcattcacctcttcaatggtgaactccagcgtctgggtcacgagatcctcaaccgaagaagcaaagttcaccgatgagcccacgtccggcgtttcgggcgggatgaaggtgctcatgatttgcgagaatggcacatcaaggttcatgttgatgcacagcaaaccgattacccggtgttcgcgatttcgaatcgcgatcgtttctgatttcatcagcacgccacttttggcgcgggtgaaatagcattttgagacgctgctgtccgcgccggtcatgtcatgcaacatacgcaatgcaaggtcggtgattggcgagccaattttacggccagtgtgctcgccattcgcaatgcggatagcggaacacttaagatcttgcagggaatgcaatacgatttcgcagtgggaaccaatgagcatcgctaacccgtccactaccgcttcataggatttcagaatatcgaagtcggtctggtcaaatggacgttgatccagcaaatcaagttcactggtttcgttggttaaaagcgacctggacatgaaaaaaacactccttttcaggagcctgtcgttaggttttcagggcaggctcattatctacacggacaactaaattaatacagcgtgtataacgctttccagtgttaattatatctgccccgcaataaaaaaaccgccgcctgtaaaggcggcggtttttttcaggattacttcttagctgctgcggctttgtcgtcagccggtgcgtctgttttcgcatccgctttcggcgccggtttgatgtccagcagttctacatcaaataccagcgtggagttagccgggatacccggaacgccggttttgccgtaagccagatccggtgggatgaccagcttgattttaccgcctttcttgatgttcttcaggccttcggtccagcccgggatcacaccatccagacggaaggagagaggctcaccacgggtataagagttatcgaactctttaccgtcgatcagcgtacctttgtagttcaccacaacggtgtcgctgtctttaggcgcgtcgccggtaccttctttctcaactttatagatcaggccagtagaagacgttttaacgcctttctctttagcgaacttgtcgcggtaggctttgcctttcgcttcgttatctttagcgtctgcttccatcttggtctgcgcggcgcctttcacgcgcgcttcaaacgcttgcagagtctgctcgatttcctggtcagacagtttgctcttgtctgcgaacgcatcctgaacccctgcgatcagctggtttttgtccagtttgacgcccagtttctcttgttctttcagagagttttccatgtaacgacccagagacgcgccaagtgcgtaggcggatttctggtcgtcatttttgaatgccgctttgctgtctgtagtcgcagcaggcttcgcagcagtatcagcagcgaaagacagcggcgcattgagcgctacagccatagtggtcgccagcagcgtaactttaaacagtgatttcatccatatctccaggacctgaggtctctcaccccagtgttaaacgtaaatgagtgacgtactataaaacgttgcggaagaaatctacagacagactcccccgaatgtcgcttcttttcagactatttttgtttaaataagtttcttgtcagggagatggatactgtacttaaggaaaaagtcagctaaacttcgccgccgctggtccattatggcgaatgagagataaacgaggtgaatgatgaaggatacaacgatcgaagcgagactggctgagctggaaagccgcctggcttttcaggacatcaccatcgaagaactgaaccagaccgtgacggcccatgagcttgaaatggcaaaactgcgcgatcacatgcgcctgctgacggaaaagctgaaggccacacagccgtcaaacattgcctctcagtcagaagagacgccaccacctcattattgaggcgtaaaaaaagcgggattatcccgcttttttattttccggagtacggaatcagtggcaaccgcagccgccgttaccgcaaccacctttaccgtggccgtggtcatgaccatggtcgtggccgtgaccaccgcagcagccgtcgtggccgtgatcgtggtcatggtcgtgaccgtgcgcaccgtgaacgtggccatgagccagctcttcttcggtcgcttcacggatcgcaacaacttctacgttgaacttcaggttctgacccgccagcatgtggttgccgtcaaccacaacgtggtcgtcttcaacttcagtgatttcaaccggcaccggaccctggtcagtttccgccaggaagcgcatgccaacctgcaactcgtcaacgcccatgaatacgtctttaggaacgcgctgaaccaggttgtcatcatactgaccgtaagcgtcgttcgcgcctacagcaacgtcgaatttgtcgccaacttcatggccttccagcgccgtttccaggccggaaatcagggaaccgtgaccatgcaggtagtccagcggcgcactcaccggagactcatcaaccaacacaccgtcttctgtacgtacctgataggccaggctgaccaccaggtcttttgctactttcatgatatctcctgagcgtgggaaaattgctggcgcagattgtagcggaaatctgcacccgtgtacccttaagcttaaaaaaactcagagcatatcgctagtctggatgaaaaatgccgatcacttgctcttctttgcgaacgtgatcgcgggcttctttgtcggcctcacgcatctggtgaccgcacttaacacattcaacgatatcgatattattttcacgccacatggccagtgtatcttgcgcctggcaggatgggcattttgcgcccgcgataaagcgtttacgtacagccatctttcgttaccctttattcaaattcatcccagccgtcgagctggcgtcgttcctgttgcatctcacgctggaagatctcctccagttcgcgacgcgcttcccgcacgcgggagatctgcgccgtgtcgctgtgcacgggcatcagttcacgcagcattcgcatatccagccggcggaaatgcatctgggcgcgttgcgcctggtgaggatgcatacccagcgaaaccagcgccttgcgtcccagctccagcgcgctggagaaggtttcgcgggagaagtgtttcacacccgcctgcaaaagttcgtgagcctccacacgtccacgcgcacgcgccagaatatgcagatgcgggaaatgctgctggcacagctccaccagcttcatcgtgtcttccggatcgttgcaggtgatgacgatggactccgcagcctctgcccccgccgagcgcaacagctcaagctgcgtcgcatcgccgtagtacaccttataaccatatttgcgcatcaggttgacggcgctgatatcgcgctccagcaccgtaatgcgcattttattcgccatcaacaggcgaccaatcacctgtccgaagcgaccaaagcccacgacgatcacctgcggtttatcatcttccacccacggcgcttcgtcttcatcgtctgcgggattcaggcggcgcgacagcagtttgtccaccagcttcatcagcagcggggtggtcatcatcgacagcgtaaccgtcaccagcagcagcgccatctggtcatctttgaacagcttctgagacgacgccgtggaaaacagcacaaacgcaaattctccaccctggcttaacacgctggaaaactgcattctttccgagctgcgcagcccgtaaatcctcgcgaggacatacagcaccagcgttttgaccgccaccagcacggcgacactcgcaataacccacagcagatgggtatagagcacgccaagattaagcgccatacccaccgagataaagaacagccctaacagcagccccttaaacggatcgatggcggtctccagctcgtggcggtactcactttccgcaagcagcaccccggcgataaacgtcccgagcgccatcgacagccccagcgcatccataaacagcgctgagccaagcaccagcagcagcgttgcggcggtgaatacctcgcgcacgccggatgcggcaataaaccggaacaccggacgcagtaaaaaccgtccgccgatcagcactccccgcgaaggccagcaccttcannnnnnnnnnnnnnnnnnnnnnnnnnnnnnnnnnnnnnnnnnnnnnnnnnnnnnnnnnnnnnnnnnnnnnnnnnnnnnnnnnnnnnnnnnnnnnnnnnnnnnnnnnnnnnnnnnnnnnnnnnnnnnnnnnnnnnnnnnnnnnnnnnnnnnnnnnnnnnnnnnnnnnnnnnnnnnnnnnnnnnnnnnnnnnnnnnnnnnnnnnnnnnnnnnnnnnnnnnnnnnnnnnnnnnnnnnnnnnnnnnnnnnnnnnnnnnnnnnnnnnnnnnnnnnnnnnnnnnnnnnnnnnnnnnnnnnnnnnnnnnnnnnnnnnnnnnnnnnnnnnnnnnnnnnnnnnnnnnnnnnnnnnnnnnnnnnnnnnnnnnnnnnnnnnnnnnnnnnnnnnnnnnnnnnnnnnnnnnnnnnnnnnnnnnnnnnnnnnnnggccagcaccttcatggagatcttcatccagtcgaaatgatcgtctccggatcctgccagcagcggcaccagcgccagcgccgggatcactgctaaatcctgaaacagcagcaccgaaaaacccagctgccccgcctcgttgcggttcatccctttgtcgcgcatcagctgaagcgccatcgccgtcgacgacatcgcaagaccgatcccgccaatcaccgcggcctgccaggaaaactgcgtcaatatcagcagtcccgcgagaatggccgcgctgagtaacacctgcgccgccccgacgccaaaaatagattgccgcagttgccacagcttggcggggttcagctccagcccgatgataaacatcaggaagaccacgcccagctcggagaagtggagaatttcatccacatcgctgataaacccaagcccccaggggccaatggcgatccccgccagcaaatagcccagcaccgcgccaatgccgagacgcgcggcaagcgggaccgcgacgacggcggcaaacaaaaacagcaccccggcaaggagtaaattcgaaccgtccattagcgtcctcccgccggaatcggtgacgccagccattcgccataggccctggcatggctcgccagtgatttcggatcctgccgccgtgcccagtagataataatcgggctcatccagtgcatacggcacatcgccgccgtcagctcaaatggccgcagaatgtcgctcatggggtaacggttcagcccgtcgtgacggtaagcgctttccggctcaccggtggtaatgacactccgccagtactttcccgccagttggttgccccccaccccgctggagaagccccggctcagcacgcggtccagccactctttgagcagcgccggacagctgtaggtataaagcggatgctggaacacaatcacgtcgtgctgacgcagcagttcctgctcgtaaggaatatcgataaaaaaatcaggatagtgcgcgtagagatcgtgcaccgttacattactgagctgtgtggccggcttaagcagcacccggttcgccaccgagtcctgtgattccggatgggcatacagcagcagcactttcgctgtctgagacatcactcccctcccggttctgtttttgtgtattgttgtcgttttgggctaccatggcggcccggtggggaaaatggcccacaccttacattatcataatgacaaattaacatagtcggaacatacggcgcttctatgattgttttctcctcgttacaaattcgtcgcggcgtgcgcgtcctgctggataacgcgactgctaccatcaaccctggccagaaagtggggctggtcggcaaaaacggctgcggtaaatccaccctgctggcactgctgaaaaacgagataagcgcggatggcggtaactttaccttcccgggcaactggcagctcgcctgggtgaaccaggagacgcccgcgctgagcgaacccgcgctcgactatgttatcgacggcgaccgtgaataccgcaagctcgaagcggagctcaacgccgccaacgaacgtaacgacggccacgccatcgccaccgtccacggcaagctggacgccatcgatgcctggaccattcgctcccgtgcctccagcctgctgcacggtctgggtttcagcaacgaacagcttgaacgcccggtgagcgatttctcgggcggctggcgcatgcgccttaacctggcccaggcgctgatctgccgctccgaccttttgctgctcgatgaacccaccaaccacctcgatcttgatgcggttatttggctggagaagtggctcaagagctatcagggcactctgattctgatctctcacgaccgcgacttcctcgatccggtagtggataaaatcattcatatcgaacagcaaagcatgttcgaatacaccggcaactacagctccttcgagcgccagcgcgcgacgcgccttgcccagcagcaggcgatgtatgaaagccagcagcagcgcgtggcgcacctgcaaagctttgtggatcgcttcaaggccaaggcgtcaaaagccaagcaggcgcagagccgcatcaaaatgctggaacgcatggagatgatcgccccggcgcacgtggataacccgttccacttcagcttccgcgagcctgaaagcctgcctaacccgctgctgaagatggagaaggtcagcgcgggctatggcgatcgcattatcctggactctatcaagctcaacctggtgccgggttcacgcattggtctgctgggacgtaacggcgccggtaaatcgacgctgatcaagctgctggcgggcgagcttaacccggtcagcggcgaaatcggcctggcgaaaggcatcaagcttggctacttcgcccagcatcagctggaatttttacgcgcggatgaatcgccgatccagcacctggcgcgcctggcgccgcaggagatggagcagaaactgcgcgactacctcggcggctttggcttccagggcgataaggtgactgaaaacaccgagcgtttctcgggcggtgaaaaagcccgtctggtgctggcgctgatcgtctggcagcgtccaaacctgctgctgcttgatgaaccgaccaaccacctcgatctcgacatgcgtcaggcgctgaccgaagcgctgattgagttcgaaggggcgctggttgtcgtatcgcacgaccgccacctgattcgctccaccaccgacgatctctatctggtgcacggcggcaaagtggagccgttcgacggcgatctggaagattaccagcagtggctgacggacgtgcagaagcaggaaaaccagccggaagagtcagcgaaagacaacgtcaacagcgcccaggcgcgtaaagaccagaagcgccgtgaagcggaactgcgcacccagacgcagccgctgcgtaaagagattgcccgtcttgaaaaagagatggaaaagctcaacgccacgcttgctgccgtcgaagagaagctgggcgacagcgaactgtacgatcagagccgcaaagcggagctgacggactgtctgcaaactcaggcgaaaaccaaatccagcctcgaagagtgcgaaatggcgtggctggacgcgcaggaacagctggaagcgatgctgcaagccgactaacacgccgggagggttatgggcttcgataccacgagcgagattacattccgtaagctcagcatcttcatgacgttcatggagaagggcaatatcgcacgtaccgccgaaacgctcggcctgagcggtgtcagcgtgcaccgcgcgctgcataccctcgaagagaacgtccgctgcccgctctttgctcacaaagggcgtaacctgattgccctcccctccgcgtggacgctgctggagtattgtcaggaggtgatgcaggtgatggagcgcgggctggaagagtcgcgcaagatcgccggtatcggccagggacggttgcgcgtcggcacgctctactcgctgacgctggaaaccgtgccgcgcctgataatgggcatgaagctgcgccgtccggatctggagatggatctgacgatgggctcgaacgacaccctgctgcacatgctggatgaaggctcgctggacgcgattcttatctccatctccgaaagcgatatcgatcgcaacagccttgaggttctgccgctgttccatgacgatatcttccttgccgcaccggcttccgccacgctaaatacccacgggccagcggatctccgcgattataaagatcagaaatttgtcgcgcttgcagaaggctttgcgacctacgccgggttccaggaagcgttccatatcgccgggtttgaaccagagattgttacccgggtgaacgacattttctcaatgctcagcctggtgcaggcgggcgtcggctttacgctgatgccgggaaggatgaagaaggtctacgagaattccgtgcaactgttgaagctggcggagccgtaccagatgcagcagctgatcgcgattgtctttgcccgcaaccgcgagcaggatccgagcctgcgcgcgctggccgccgaagggcggatgtatgccagaagtttgcaggatagtgcctgatgttattgcccggtggcgctacgcttaccgggcctacaatccgggagtaggcccggtaaggcgcagccgccaccgggcaaaaagtcaccgctgaagccgacccgccagatgaaccgccacgtccaccccgctgcgctccagcgaaatggattcaccttcccacgccgcctgccgcgtcagacaggtcaggatgccccctggcggcatctcaatcgccagccgcgcttcacgctcgttagcggaaatcaccgcctcctgccagcgcacggttcgcgccatattcatcgccagatcgtcggcaattttctccggctgccagagcacgcgtccggtactgccgctcaggtacgcacagcgcggacgtgaaagcgtgaccgaattaaatgctgccaccagcttctgcgccggttccgccagcagttcacagtgcgacggtacgctcaccgccagccgcttagccttgctcgcgccttttgccagggcgcgctccgccacctgcgccatgccgtcatcggttccggcaatcacgatctgcgtttcggcgttcaggttagcaatataggttcctgtcccctgaatcaggttttccacctggggcagggtcaaccccataatcgccgtcaggccgtagccgtgcgggtatgcctgctccatcagatcgccgcgcaacgccaccagcttcagcgcgtccgtaaagtccagcgcaccggcgataaccgccgcaggataagcgccaatggacagcccgctgacgatatccggcgacacgccgcgacgttccagctcgcgcgcccacgccacgccggcaatcaacagcgaaagctgaaccgcacgggtgtgggttaacgaggatgcgctgtccagggtatcgacttccgcccccagcacagcacgggcctgctccagctccgttcccggcaggttttgcagcataccttcatgctgtgtgccctggcccggaaaggtaaacagtattttcattactcctccctgtgccatggatccgccaccaggcgcggtccacattgcgtttttagcagcgttttgccgtcgcgtaaccattccgccagcgcgaatccgccctcgggcgtgtccacctgcgtatccgcccggcacaacgcacggctgagctgagcctgccagccagtaaacgcctcaggggaaacggcacgcggggcgcggatgagcagatcgagatcgctgtcggagtggatcaccggaatgccggtcgccagcgcgtaacccgtactgccggttatcccccacgtccacggccacgactgctgcgcaagctgaagcgccacctgaaccggcggctgagtgataaacggcgaacgcagcaggtcggcggcaacgctcaaatcttcgggcgacaccacgcgcaacacgttctcaggcttcacccatccggccgcccgctggtcgcggcgcaatccgcgcacgccaacgggaatacggccttcattatcaacatcacgccgcaccactaccggtagtccggcatgccaggccgcgtccacccaggattcggtaatcccttccagggcgtcgcgcgcggtaagccagatgaggtcgtgtgggcgtaatgttgtggtcatgattacattcctgaagtcagcgagataaacagcggcagcgacaggatacacagtacggagctcaacagcagcacggcttcagcatccggcgactgcacgccaaagcggttaccgaacaccacgccaaagaagcccgctgacagcgcaatcatcaggatggcggtgatcgccacagaaccgtgcagaccgaagattaaaacgatcccccaggcgatcgctggctggatcagcagcttggcgatagtggaagtgatcaccatggtgttgatctgaagtttacgcgcggagaggatcaccccggtcaggaacagcgccgcagcggtcgcagacagtcccagcggtttaatcgccgccagtaccagctccggcattttgatgccgatagcggacaggatcacacccagcagcgggcccatcacgatcggttttttaatggaacgccacatcagcaccggcagcatggaaagcgttgaacccgagttattgccttcggcgcgggctttctcacgctccagaatcagcaggcagaacggggtcatcaacactgaaccacaggcgatggagaccgccacggacagtgaggttgaagggccttcgcccagcacgctgcccagaatcggcaggccaagcgccgcgtagtttggcagggcgacggtaagcgtcagcacggccgcatcctgcggggattttttaaacactttcgtcgcgaggaagtagatgaccgcataggtgatccacatcgccagggtgagcaccaggatcagcggcgactgcgccacgatgccggtccacggggtttgcacggtggcgctgaacagcgcagccgggagtgcaaaatccatcacgaagatattcagcagggaaacatttttgttatcgaccatctttgccttaccggcccagaatcccagcagcatgatgacgaaaatcggtgcaagagcatgaacaattacgtaagtcataaatcacctgtagtaaaaaagtttaagcactggcgcgatgtttattattttcaggatgcaggttcccgcgtggacgcaacgggcgcgcccacggggtgatgcatctggcaggtctctttttacttaccagctggctcgcatacgttcacgtacgagcgccgagctgcggcggttgtcagcacccagacggtttttcaacgtggtgtcctgacgagcgtcgctgatggcctgttgcagggtggttttcacccgcgtcagatcgctttcggtaggggcatccggattgctgatatccagcaggtcggaaagcagccccagcgtggcgtagttgctgatgtcatacgccattggcggaatggttgcagccagtttttccagcgcctcaacggtacgcagcgtaatgcgcgccgcagactctttgcccatggcatggatcagcacgcctttatcgttgaaggcaatcagacggttagcctggtagccgtgcgccagaaacgcgccggacatggccttaccgacgataagaccaatcaccggatgacccgccagccgcgcattagcgtaggcggcagcggcgccggccagcgcctggtggataccaaacgcctcttcgcgacggccataggcctggcttgggacgtcgattaccgccacaatcgggcgcttcacggctttatctgcgtcggcggcgacggtttcgctgaccacttttgccagcgtccatccttccagcaggccgacttcaccctgcgccgcgcgcgggaagtggttgttggcgtccggcaccacggcgacaaaacgcaccgtttcaccgtttagctcgccgtctgcggcctgcacggacgggcataacccctccagacgtttcgcgttcggggccagagtttccagccagagttcgccacggctaattgcgttagtcatcatttcacctcccgggcaaaaagcgctttaatctgttcggcatcggcctgtttgcgggtgtcgaaattcgtcagacggttcaggtaatcgtcgtaattatcggtgcgatgtttcgccggtacgcctttggcgatggcttcgttcatcgcggctttcaccgcgttcacgccgtcgcccaccagcgcatccaccagcccgctttcatagcgcacttcgccgccggtcatgctccagataaacggacggtcgcgggagtcatactcttcaatgcccgcttcctgctcgataacctgcggaccgttgaggccgagccgcgcttcgcgggtcacaatcaggtagctgcacagcgccgcggcgatagacatcccgccgaagcagcccacggtcccggcgacaatcccgacgaccggggtatagcgacgcaggtcaacgatcgcggcgtggatatcggcaatcgccgccaggccgaggttggcttcctgcaaacgtacgccgccggtttcgaggcacagcaccgcctgagtcggaatgccgttgcggttatcttccgccgccagctccagcgccgccgccattttggcgccggacacttcgcccatgctgccgccctggaaggtgccttcaatcgccaccaccaccgcaggctggccgttgatggtccctttcgcgaccaccatgccgtcatcggcctgaggaacaatcccctgtggcccaagccacggagagataatgccttcaaacggatccagcagttcgcggtagctgccgtcgtcgagcagcgcctgcgcacgctggcgcgcttttaattcgataaagctgctgtcatcacgcatggttcaccccttcaaaaacctgttcgatacgaatgcgtgccacgcccggcgtcgcgccgaagtcgtggatggtcagcttacctgcgggcaggctgctgacggtttgcaggcggttgaacaatgcctcccagcgcccgcggctgttgtcgacggaggtggtgatatcaatggttaaggtctggcccggttcggcggtgaaaagcgcctccatatccccggaaccgactacccctgccagcgccctgccgcttacttcgcggctggcgggcacggtcaatgtgattttttccataacatcctcttaatgctttgaatagggcgtttcgacgcggtcaagaaacagcgtggcggcaagcaggtctgcggctccgcccggcgaggcgttaagcgccagcatctgacggtctaaccgcgccagcgcctgctgcccggcgagcgttgcgcatcctccggcgttcagcaccgcacgggcgccgttctgcatggcgtccagcccctccatgccggcgcgcgacagcacgcaggtgtcggtgagcgaggtcatgatcgccatcagcgcgtcgagtctggcctgcgtttcgctgctgccgttgagacggctgaggcgaagctgcggcagcgcgcgctgcatgatgtgcggaaacgcctgttgagcctcttcacgcgcgcccggcacgcggtagcggtgcgtgacgcgtaaccccttgctgaacactttcggcgccgcgtcatccggcagcttcgccagctgagcggcggtgttcgcgacggtttgcgcccgggcatcgccgcccagcatcgccaccgcgctcaccagcaatcccagcgcccagatcgcgccacggtgcgtgttcacgccgtcggtagcggccatcatctgccgttcgccttcgcgacccaggcggccaacggtttgccggagggcaatatccgccggacgctgccagctctgctgcgccagcgcctgaaacgtgggggtcaggctgtgagcggagcgctccatcagcgcaagcgataaatcgtggtgcgcgccgttcccccggctgtccaccagaccgggtttcgggcttaaacgtgcttcgtcaatcagacactgcgtggcggttcgcgccagccattcggcaccgccttcaacctggatctggggcagaagtttcattaccagctccggaatttcgcaggtgggttgtaaagaccgccggaccattccaccaggtccgcgacgctaccggccgccagcagcgaacgggtggcgtcggtacgacgaatgcccatatcttccggatacacaaccttgccgctctggcgcagttccgccacacgtttggcgtcaacgcccagaccgatatcggtgatccccgccacggcggcgaccatggcgcgacgctcttccagatctttcgcccggtagaggtaagcaatcccctcttcagtcagcacgtgggtgacgtcatcgccgtaaatcatgaccggcgccagcggcataccagaggctttcgcgacctcaacggcgtcgagtttttccacgaaggttggcttcacgcccgcctggaaggtttccaccatctgcacaaccagctttttaccgcgctgcatcgggtcaggctcggtgatcatgttcagccaggccggtgtggcgtggcgacgaccgtgcggatcgtggcccatgtttggcgcgccgccgaagccggaaagacggccgcgagtcacggttgaggagttagcgtaaccgtcgacctgtagcgtggagccgataaacatatcgaccgcgtactgacctgccagctgacagaaggcgcggttagagcgcatggagccgtcggcaccggtaaagaacacgtcaggacgggcgcggatgtactcttccattcccagctcgccgccgaagcagtggacgctctccacccagccgctttcgatggccgggatcagcgttggatgcgggttcagggtccagtgtttacagattttgcctttgagtccgagctgttcgccgtaggttggcagcagcagctcgatcgctgcggtgttaaagccaatcccgtggttcagggactgcacctggtgttcagcgtagatgcctttaatcgccatcatcgccatcaggatgtgttcctgtttgatcaggcgcgggtcacgggtgaaaagcggttcgataaagaacggcttatcggcaaccaccacaaaatcaatccacgagcccggaatatccacacgcggcaggtcgcactcgtcgtccaccagctcgttcacctgcgcgatgacgatgccgtcatggaacgcggcggcttccaccagcgccggggtatcttcggtactcgccccggtatagaggttgcctttgcggtccgctttaaaaccggcaatcagcgccacgtttggcgaaaggtcgacgtataaacgtgagtagagttcgatgtaggtgtgaatcgccccgatttcgagctgaccatcctccagcagttgggagattcgcaggctttgtgtaccggagaaggagaagtccagcttgcgggcgatgcctttctcaaagatgtccagatgttcgctgcggcccacgctcggcatgatcatatgcagatcgtgcacgatttgcgggttcacttccgccagtgaacgggaaaggaaatccgcctgcttctggttgttgccttccagaacgactttgtcgcctggtgcgatcagtttttccagcatggcgacaagatcgccggttggcagtaccttgccctgcaccggtacggacgccagacgacgcgctttctcactgcgtcgggtgttccattgccgggtgggtgtttgcccagataacattattaacctcctgattcagcacatcattctgatttgcttaacgttgagtaaagtgtgcgctctggtgagaaaggcatcaattaagcgtagagccaaatcattagcctgagagtaataatcaaggtaaatatttgtgatcgggatcagttcatgtttcggaaaaacgggctaaacggggtacaattcggaaggtatagttaatttctgacaagaatcagcatcgcccttatgacccaaatcattccctcagacttcgacattgcagccgaagagagcgcagagttcgtgcccatgcgcggtgtggctaaccctcacctgcaaaccatgctgccgcgcctgatccgccgcaaggtacagttcaccccgcactggcaacggctggatttgccggatggcgattttttggatctcgcctggagcgaagatccggatcgggccagacataaaccccgtctggtggtgtttcacggtctggaaggcagcctgcacagcccttacgcacacggtctcattgaggcggcgaaagcccgcggctggcttggggtagtgatgcattttcgcggatgcagcggcgagcctaatcgtcagaaacgtatttatcactcgggtgaaaccgaggacggtacctggttcctgcgctggctaagagacaatttcggcgaggcgccaacggcagcggtggggtattccctgggcggcaatatgctggcctgcctgctggcgaaggagagcgacgccgtaccgctggatgcggcggtgatcgtctctgcgccctttatgctggagcagtgcagctatcatatggaaaaggggttttcgcgagtgtaccagcgctacctgctcaacctgctgaaagccaacgccgcgcgcaagctgaaggcctatccggaaaggagagcgacgccgtaccgctggatgcggcggtgatcgtctctgcgccctttatgctggagcagtgcagctatcatatggaaaaggggttttcgcgagtgtaccagcgctacctgctcaacctgctgaaagccaacgccgcgcgcaagctgaaggcctatccggatacgctgcctgtgacgctgcaacagctcaaacgcgtgaagcgcctgcgcgagtttgatgatttgatcacctcgaaaattcacggctttgccgatgcgattgactattaccgtcagtgcagcgccatgcctttactgaaccaaatcacgaaacctacgctgattatccacgccaaagatgatccgtttatggatcaccactcgattccggcgcccgatcatctgccggccaatgtggagtatcagctcacccaattcgggggacacgtcggctttgtcggcggcacgctgcgtcggccaaaaatgtggcttgagacgcgtattcccgactggttaacggcttatctggacggtaaataatgattattccctggcaggatctctctcccgacacgctcgataatctgattgaaagctttgtcttgcgcgaaggcaccgattatggtgaacatgaacgttcgcttgaacaaaaggtcaacgatgttaagcgccagcttaaaagcggcgacgtggtgctggtatggtccgaactgcatgagacggtcaatatcatgccccgcaacgcgtttcacggctgatctttacacttttccagtcagggagttgctatgtctgccagacatccggttattgccgttacgggttcgagtggggcgggaaccactaccaccagcctcgccttccgcaagatcttcgcccagcttaacttacgggcggcagaggtagaaggcgacagctttcaccgctacacgcgcccggagatggatatggccatccgcaaagcgcgcgatctgggtaaacacatcagctacttcggcccggaggccaatgacttcggcctgctggagcaaaccttccgtgaatacgggcaaagcggtaccgggcagtcccgcaagtatctccacacctacgatgaagccgtgccctggaaccaggtccccggcacgttcacgccctggcagccgctgccggaaccgactgacgtgctgttttacgaaggattgcacggcggcgtggtgacgcctcagcacgacgtggcgcgccacgtggatttgctggtgggggtggtgccgattgttaaccttgagtggatccagaagctnnnnnnnnnnnnnnnnnnnnnnnnnnnnnnnnnnnnnnnnnnnnnnnnnnnnnnnnnnnnnnnnnnnnnnnnnnnnnnnnnnnnnnnnnnnnnnnnnnnnnnnnnnnnnnnnnnnnnnnnnnnnnnnnnnnnnnnnnnnnnnnnnnnnnnnnnnnnnnnnnnnnnnnnnnnnnnnnnnnnnnnnnnnnnnnnnnnnnnnnnnnnnnnnnnnnnnnnnnnnnnnnnnnnnnnnnnnnnnnnnnnnnnnnnnnnnnnnnnnnnnnnnnnnnnnnnnnnnnnnnnnnnnnnnnnnnnnnnnnnnnnnnnnnnnnnnnnnnnnnnnnnnnnnnnnnnnnnnnnnnnnnnnnnnnnnnnnnnnnnnnnnnnnnnnnnnnnnnnnnnnnnnnnnnnnnnnnnnnnnnnnnnnnnnnnnnnnnnnnnnnnnnnnnnnnnnnnnnnnnnnnnnnnnnnnnnnnnnnnnnnnnnnnnnnnnnnnnnnnnnnnnatgagcgagcgcggccattcgcgagaggcggtcatggactcggtggtgcgctccatggacgattacatcaacttcctgacgccgcagttctcccgaacccacattaacttccagcgcgtccccaccgtggacacctccaacccgttcgctgcaaaaagcatcccgtcgctggacgagagctttgtggtgatccacttccgcaacctggaaggcattgattacccctggctgctggcgatgctacagggttcgtttatttcgcacatgaatacgttagtggtaccgggcggaaaaatggggctggcaatggagctgatcatgacaccgctggtgcagcggctgatggaaggaaagcagatcgcgtgacacctgttgccggatggcgcttcgcttatccggcatacgttcgtgcagttgtagcttttgtagggcgggtcagcgcagcgccacccgccaaaaattaagccgcgatcacttcatacgaatgggtgatttttaccgctttctccagcattaacgccacagagcagtatttttccgcagacaggtcaaccgcacgcgagaccgccgcatccttcagttctttgccggtgacgataaagtgcaaattaatatgcgtgaacaggcggggcgcctcttcacgacgttccgacgtcagcttcacttcacaatcggtcacgtcatgacggcctttttgcaggatcgacaccacgtcgatcgcgctgcatccgcccgccgccatcagcaccatttccatcgggcttggcgctttatcgccggagttgccatccatcaaaacctggtgcccggaagcagactcgcccaggaacgttaacccttcaacccatttcacacgcgcttgcatattcactcactccaacgttgcattttttatgacagattacgtgtacgttacatttctcgcaacggaaggcgacctgcgtcatgctgaagcgagacaccaggagacacgcggcgaaagctatgctaaaacactctggatgctacagtaatacattgacgttacacatgtatgcagaggacatcaaactttactggctgcgaaacgttacgacagccgacttcccaggtatgggtaagaattcgattgcaaccccagagtccggatgcatcttatgactctggtgacagcttataacagaggataacagcgcatggtgcttggcaaaccgcaaacagacccgactctcgaatggttcttgtctcattgccacattcataagtacccatcaaagagcacgctgattcaccagggtgaaaaagcggaaacgttgtattacatcgttaaaggctcggtggccgtgctgatcaaagatgaagaagggaaagagatgatcctttcttatctgaaccagggcgattttatcggtgaactgggcctgtttgaagaaggccaggaacgtagcgcctgggttcgtgcaaaaacagcatgtgaagtggctgaaatttcttacaagaaattccgtcagctgattcaggtcaaccctgacatcctgatgcgtctttcttcccagatggcacgccgtctgcaagtgacctctgagaaggtgggtaacctcgccttcctggacgtgaccggtcgtatcgcgcagacgctgttgaacctggcgaaacagccagacgccatgacccaccctgacggtatgcaaattaaaattacccgtcaggaaatcggtcagatcgtcggctgctcccgtgaaacagtgggccgtatcctgaagatgctggaagaccagaacctgatctctgcccacggtaaaactatcgtggtctacggaacccgttaatttcggtcaaacggcgtgccgccgcagggtggcacgccgtttttgtctctactcctcatgtggcgcaggctgatctatcacccggaagttaactacgcactacgacaaacgctggtgttgtgtcttcccgtggccgtgggcctgatcctcggacatcttcagcaaggcctgctgttttccctcgtgcccgcctgctgcaacattgccggtctggatacaccgcataaacgcttttttaaacgtctgattattggcggctgcctgtttgccggctgtagccttgccgtacaactcttactggcccgcgacattcctctgccgttgatcctgaccgtgctggcaatgacgctcggcgtcaccgccgaaatcagctcgctgcacgcccggctgcttcccgcgtcgctgattgccgccatcttcaccttaagccttgcgggcaatatgccggtgtgggagccattgctgatttacgccctcggcacgctatggtacgggctgtttaactggttctggttctggctgtggcgggaacagccgctgcgcgaatccctgagcctgctctacgtgcagcttgctgaatactgcgaagcaaaatacaccctgctcactcaacataccgacccggaaaaatccctgccgccgctgctggcgcgccagcaaaaagtggtggatctgatcagccagtgctatcagcagttgcacatgcttgccgccaacaaaaatcatgaatacaagcggctgctgcgaaccttccaggtcgggctggatttgcaggagcatatctccgtcagccttcataatccggaagaggtgcaaaagctggtggagcgcagccatgcggaagcggtgatccgctggaacgcgcagaccgtcgcggcccgcctgcgggtgctggctgacgatatcctctatcaccgctacccgacgcgctttaacatggacaaacagctcggcgcgctggaaaagattgcgcgtcagcacgcggataacccggtcgggcaatttgctgcctggcatttcagccgcatcgcccgggtgttacgcacccagcgcccgctttatgcccgggacctgatggccgataagcaaaaacggctgccgctgctgcccgcgctcaaaagctatctatcactgaaatcttccgccctgcgcaatgccgcgcggatcagtgtgatgctgagcatcgccagcctgatgggaatggccctgcacctgccgaaaccctactggatcttaatgaccgtgctgtttgtcacccagaacggctatggcgccacgcgggtgcgcattctgcatcgggcgggcggtacgatggcggggctgattatcgcgggcgtgacgctgcactttcacgtgccggaaggctataccctggccggtatgctggcgatcacgctggtgagctacctgatcatccgcaaaaactacggctgggcgatggtgggctttacggtcacggcggtgtataccctgcaactgctcacgcttaacggggaacagtttattattgcccggctggtcgatacgctaattggctgcctgatcgcctttggcggcatggtctggctgtggccgcagtggcaaagcgggctgctcaggcagaacgcccacgacgcgctcgaagctgaccagcaggccattcgtcttattctgagcgatgacccgcagccctctccgctggcctacgagcgcatgaaggtcaaccaggcgcataacgccctgttcaactcccttaaccaggccatgcaggagccgggctttaacgcgcactatctggctgacatgaagctgtgggtcacgcacagccagtttatcgtcgagcacatcaatgccatgacgacgctggcgcgggagcacacgatgctgacgccggatctggcgcagcgctatttgcagtcgtgtgaaattgcgttgcagcgctgtcagcagcgtctggagtatgacgcgccgggcgagtcaggggattcgaacattctggaagcgccggagacgctgacccatgggccgatgagcacccttgagcagcatttacagcgcgttctcgggcacctgaacaccatgcacaccatttcgtcggtggcatggcgtcagcgcccgcatcacgggatttggttaacgcgccggttaaaacgaaccgcgtattagcctctgacgatcttcgcgaccgccgcggcaaaacgggttaacccgtcttcgatatctttgtcctccaccaccagcgatggcgcaaagcgcatcacgtccggcccggcgttgagcaccatgacgccttcgtgcgcggcggcgtgcaggaaatcgcgcgcgcggcctttgtactgcggcttcagttcggcgccgatcagcagccccatgccgcggatctcgctgaagacatcaaaatgttcgtcaatctgctgaagatgtttcacaaacaagtcgcgtttcgcattcacgccattcaggacgtccggcgtattaatgatgtcgaacgccgcacccgccacggcgcacgccagcggattaccgccgtaggtggagccgtgtgagcccacatgaaatgcggaagcgatatcctgggtggtgagcaccgcactgaccgggaaaccgccgccgagcgctttcgcgctggtcagaatatccggcgttacgccgtagtgcatataagcaaacaggtctccggtacgccccatcccacactgcacttcatcaaacaccagcagcgcctggtgctcgtcgcacagctcgcgcagcccttgcagaaattccggggtggccgccgtgacgccgccttccccctgaatgggctcgaccaccacggcacaggtgtgatcgtccatcaccgctttaacggcgtggagatcgttaaacggcacgtggatgatatccgcaggtttcggaccaaagccgtcggaatacttcggctggccgccaacggaaacggtaaagaaggagcgaccgtggaaggcgttatggaaggcgatgattttggttttgtacggactatgacgcgtggttgcgtagtagcgcgccagcttaaaggcggtttcgttggcttcggtgccggagttcataaacagcacgcgttcggcgaaggtggcatcgatgatcttacgccccagacgcagcgccggttcgttggtgaacacgttgctcgtgtgccacagcgtttcgccctgcgttttcagcgcgtccaccagcgcaggatggcaatggcccagcgccgtcaccgcaataccgcctgcgaaatcaacatactcgttgccctgctgatcccagacgcggctgcctctccctttcaccgggataaactcagccggtgcataaatcggcaggatcacttcatcgaatgtcgcgcgggtaattgctggttgttcagttgccatgtcatgaccatccatttttatgtcacagtgcttgtgaaaatataatcacaaaatatgcataaaaaatcacaacaaggcaacagatattcagcgattaaggaaattggccagcagcgcgtgcccctgttcgctgagaatgctttccgggtggaactgcaccccttccagatcgtactcgcggtggcgaatgcccatgatctcctgcgtctcgctccaggcggtaacctcaaagcaggccggcagggtcggcggatcaatgatcagagaatggtagcgcgtcacggttaacggattgtttagccccaggaatacgccggtaccggtgtgcgtgatcggtgaggttttgccgtgcatgactttcgcggcacggacaatggtggcgccaaagacctgcgcaatggcctggtgacccaggcagacgcccagaatcggcagtttgcccgcatagtggcggatgacctccagcgagatgccagactccgaaggggtacacggccccggcgaaatcacgtattttcgtggggtgccagcgcgtcaatgtcagccagcgcgatctcatcgttacggcggacaaccacctctgcccccagctcacaaaaatactggtaaaggttccaggtaaaggaatcgtagttatcaatcagcagaatcatggcggctcctgaaaaaatggccgccctattttacgcagattcccgcgcttcgctcacaactttggcaaagatggcgttcagggcggtcaaatcccccatcgccccgctctggttggcggctgcccagtcgtccgggtcgatcccctgccagttcagcacatagcccgcatggatagccagttgttcaaagaagatccgctgggccacgccattaccgctaataaacggatgtagcatgttgatttcacagtagtaatgactgattctgtctgtaaactcttctttctgaaggcccaccagatatttatcactttccagcgaagccatcagctcattacccactttctcgatgtactcgaaatggcaaaaaggaatgtcgcccttagaaatatcggcggtgcgcagctcgcccgcgcctttcatttcgttgcggaataaatggcggtgaataagacacagatggggtaaacccggtgcggaaggccccagttccagcgtctcgatatcaggtttagcgggacccttacctttttcaaggaggcagctggcctgaaaattgacattacgttgttgctcccagagacgggatttttgcttgtcggtgagttttttcactacgcctccctgaatagtccgtttgccacaagtataagcagcaaaacgcgctttcgcagggagggcggaaagacacgggcaggatatgcccgtgtggaagaacgattatggcaacactttcgcggagagaatgacgacaggcttagtcggcacattctggtatggaccgacatcgtgagtctgaacctgagagatcttatccgcaacgtccatgcctttcaccactttgccaaacaccgcgtagccaaagtcgcgctgaccgtggtccaggaaggcgttatcagccacgttgaggaagaactggctggtggcgctgtctttgtccgccgtacgcgccatggagatggtgccgcgcttgttcagcaggccgttgtctgcttcatttttgatgggcgggttgggctgtttctgctgcatctgctcgttaaaaccgccgccctgaatcataaagcccgggatcacgcggtggaacgtggtgttgttataaaaaccactgttcacgtagtcgaggaagtttttcaccgaaacaggggctttctggctatccagctccagctcaatattccccgcagaggtagtcagcaggacgtgggggtctcctttggctgccagcgcagcaggggaaacggcagaaagagcaaacacagctgcgacagccgccagtgttgatttgagcatgagaattccttaacaaagcgcagtataaaaagcgaatggcttgattctaaagagcagtatgaacccagaccagtcttttacctaattttaccaaattgaaacaattattaccgcgcaaacgattgttcaccccgcaacgtaatgtgatctgcatcacgttaaaacctgcaattgtgctcaaaattttctgaaaagatttaattagatcactttcgcgactaaaatctgcccgctcaaacgcagtcattgcgtttttctttacttttaacaggccagacatgactaacagcaatcgcatcaagctcacatggatcagcttcttctcttacgccctgaccggcgcgttggtgatcgtcaccgggatggtgatgggaaatatcgcagactacttccagctgcccgtttccagcatgagtaataccttcaccttcctgaacgcggggatcctgatctctattttccttaatgcctggctgatggaaatcgtgccgctgaaaacgcagctgcgtttcggcttcgtgctgatggttgccgccgtggcgggcctgatgctgagccacagcatcgccctcttctctgccgccatgttcgtgctgggtctggtgagcgggatcaccatgtcgatcggtacattcctgattacgcatatgtatgaaggccgccagcgcggcgcgcgtctgctgttcaccgactccttcttcagcatggccgggatgattttcccgatggtcgccgcgtatcttctggcgcgcagcattgagtggtactgggtgtacgcctgcattggtctggtttatgtcgcgatctttgttctcaccttcggctgcgagttcccggtgctgggcaaaaaagcgcagactacgtccgagccggttgcgaaagaaaaatggggtatcggcgtactgttcctctccatcgccgcgctgtgttacatcctcggtcagctgggctttatctcctgggttcctgaatacgcgaaaggtctgggcatgagcctgaacgatgcgggtaaactggtgagcgatttctggatgtcttacatgttcggcatgtgggcgtttagctttatcctgcgcttcttcgacctgcaacggatcctgaccgttctggcgggtctggcaaccgtgctgatgtatctgttcatcaacggttccccggagcatatgccgtggttcatcctgaccctgggcttcttctccagcgcgatttatacctcgatcatcacccttggctctcttcagaccaaagtggcctcgccaaagctggtgaacttcgtgctgacctgcggcaccatcggcaccatgctgaccttcgtggtcacgggcccgattgttgcgcacagcggcccgctggcggcgctgcataccgctaacggtctgtacgccgtggtgttcatcatgtgcttcgtgctgggctttgtgacccgtcaccgtcaacacaacccggcaacagctacccactaatcgccgtaacccctttgcgtactgcaaaggggttttcccctgctcacccgccctgcccgccaatgggttaaaaaacaccactacatttgtgcaaaaaataagcacgcacaaaaatcaaacaatatccgtcacttataaaaatcctgacaaatcatagatatacccactaaggggtaggtgaaggcgtatttgatttgcatcaataagtgcccctgctgaatcgttaaggtaggcagtaatagaaaagaaatcgaggcaaaaatgagcaaagtcagactcgctatcatcggtaacggcatggtcggccaccgctttattgaggatcttctcgataaagccgatgctgagcagttcgatattaccgtgttctgtgaagaaccccgcaaggcgtacgaccgtgtgcacttgtcttcctacttctctcaccataccgccgaagagctctctctggtgcgtgaagggttctacgagaagcatggcgtaaaagtgctggtgggcgaacgcgctatcaccatcaaccgtcaggagaaagtgatccactccagcgccggacgtacggttttttacgataagctgatcatggcgacgggctcgtatccgtggatcccgcctattaaagggtcggaaacccaggattgcttcgtttaccgtaccattgaagacctcaacgccattgaatcctgcgcacgtcgaagcaaacgcggcgcggttgtcggcggtggtctgctgggtctggaagcggcaggcgcactgaaaaacctcggcgttgaaacccacgtcatcgaatttgccccgatgctgatggcggaacagctggaccatatgggtggcgaccagctacgccgtaaaatcgaaagcatgggcgtgaaggttcacaccagcaagaacaccaaagagatcgtgcaggaaggcaccgaagcgcgtaaaaccatgcgctttgccgacggcagcgagctggaagtggatttcatcgtcttctccaccggtattcgcccgcgcgacaagctggccacccagtgcggtctggccgttgcgcagcgcggcgggatcatgatcaacgatacctgccagacctccgatccggatatctacgccatcggcgaatgcgccagctggaataaccgcgtatacggcctggttgcaccagggtacaaaatggcgcaggtcgccgttgaccatatcctcggcagcgaaaacgccttcaccggcgcagacatgagcgccaagctgaaactgctgggcgtggacgtgggcggtattggtgatgcgcatggccgcaccccgaactcccgcagctatgtttatctggacgaaagcaaagaagtctacaaacgtctcatcgtcagccaggacaacaaaaccctgctcggggcggtgctggtgggtgataccagcgacttcggtaacctgctccagctggtgctgaacgccattgagctgccggagaacccggacgcgctaatcctcccggcgcacgcctccagcggtaagccgtccatcggcgtggataaattgccggacagcgcgcaaatctgttcctgcttcgacgtgaccaaaggcatgctgatctccgccattaacaaaggctgccacactgttgcggcgctgaaggcggaaaccaaagccgggaccggctgcggcggctgtattcctctggtcactcaggtgctgaacgccgagctggcaaaacagggcattgaagtgaacaacaacctgtgcgagcacttcgcttactctcgccaggagctgtatcacctaatccgcgtggaaggcattaagtccttcgacgaactgctggagaaacacggccagggctatggctgtgaagtatgtaagcctaccgtcggttccctgctggcgtcctgctggaacgaatatgtgctcaaaccagaacacactccgcttcaggacaccaacgataacttcctggccaatattcagaaagacgggacttactcggtgatcccgcgttctgccggaggggagattaccccggaagggctggtcgccgtgggccgtatcacccgtgagtttaacctgtacaccaaaatcaccggctcccagcgtatcggcctgttcggtgcgcagaaagatgacctgccggaaatctggcgtcagctgattgaagcgggctttgaaaccggtcacgcgtacgccaaggcgctgcgcatggcgaaaacctgcgtgggcagcacctggtgccgctacggcgtgggcgacagcgtgggcttcggcgtagagctggaaaaccgctacaaaggcatccgtacgccgcacaaaatgaagttcggcgtctcagggtgtacccgtgaatgtgcggaagcacaggggaaagacgtgggtatcattgccacggagaaaggctggaacctgtacgtgtgcggtaacggcgggatgaaacctcgccacgcggatctgctggccgccgatctcgatcgcgatacgctgatcaaatacctcgaccgcttcatgatgttctacattcgtaccgccgataagctgacccgtaccgcgtcctggctggataatctcgaaggcggcatcgactacctgaaatcggtcattatcgacgacaagctgggtctgaatgaacagctggaatccgagatgactcgcctgcgcgaggcggtgatctgcgagtggaccgaaaccgtgaacacgccagcggcgcagacgcgcttcaaacactttatcaacagcacccagcgcgacccgaacgtgcaggtggtgccggagcgcgaacagcatcgtccagcgaccccgtatgaacgtattccggtgatgctggtggaggaaaacgcatgagccagtgggttaacatctgcaacattaacgacattctgccagcaaccggcgtctgtgccctgctgggcaacgagcaggtggcgattttccgccctcgccacgatgaacaggtctatgccatcagcaatatcgacccgttcttcgaggccagcgtgctctcccgcggtctgattgcggagcaccagggcgagctgtgggttgccagcccgctgaaaaagcagcgcttccgcttaaccgacggactctgcatggaagatgaaagcttctcggtcaaacactacgacgtccgcgtgaaggacggcgaggtgcagctgaaagcgtaacctctcgccttttcaataggaaaggcttatgaccccttatgggtaacggcaggaaaaaccgtatgttctgtacgattcctgctgttatcctgacgtcaattcttcccccgccatgaatgctgtgaggtaacgtcgtggatcacctgccgattttttgtcaattacgcaaccgcgactgcctgctcgtgggcggcggcgatgtggctgaacgcaaggcacgcctgctgttagaggcgggtgcccggctgaccgtcaacgccctcacttttgccccacagtttgacgtctgggcgcaagaagggatgctcacccaggtgcagggcgaatttgatgaatccctgctggatacctgctggctgaccatcgccgcaacggataacgatgacgttaaccagcgcgtcagcgacgcctgcgaagcgcgccgcatcttctgtaacgtggtggatgcgccgaaagaggcgagctttatcatgccgtcgattattgaccgttcaccgctgatgattgcggtgtcgtccggcgggcgctcgcccgttcttgcccgtctgctgcgggaaaaactggaagccgtgctgccgcagcatcttggtcagatagcccattacgccgggcagttgcgttcccgcgtgaagcaaaccttcgcaaccgtgggcgaacgccgtcgcttctgggagaagttctttgtcaacgacaggctggcgcagtcgctggccaatcaggacaccaaagccgttgaagagacgaccgagcaactcctctctgaaccgctggatcatcgcggtgaagtggtgctggtgggcgctggccccggcgatgcgggcctgctgacgctgaagggtctccagcagatccagcaggcggacatcgtggtgtatgaccgtctggtctctgatgacatcatgaatctggtgcgccgggatgctgaccgcgtgttcgtcggcaaacgggcaggttatcactgcgtaccgcaggaggagaccaaccagatcctgctgcgggaagcgcaaaaaggtaagcgcgtggtgcgcctgaaagggggcgatccgtttatctttggtcgcggcggcgaggagctggaaaccctgtgcaacgcgggtattccgttctccgtggtgccgggcattacggcggcgtccggctgttctgcctattccggcattccgttaacccatcgcgactatgcccagagcgtgcgcctggtgacgggccacctgaaaaccggcagcgaactggactggcataatctggccgctgaaaagcagacgctggtgttctatatggggctaaatcaggcagccacgattcaggcgaaactgctggagcacggcatggaagcagatatgccggtcgcactggtggaaaacggcaccgccattacgcagcgcgtggtcgatggcgtgctgacgcagctgggcgagctggcgcagcaggttgaaagcccggcgctgatcgtggtgggtcgcgtggtagccctgcgcgaaaaactgaactggttctccagccactaacgcataatctctcccgggagtagtctttaagcggactactcccttcttacctcagtcgataacataccgcccgcataatggaacttttccatttattccctcgtgttacatccaattttcgattttttgacaaggaatgcgtatgttcaaactggcaaaagctgccgtactggtcggcctgttatcaactctgacggcctgcaccggtcacgttcaaaatactaaaaataattgcagctacgattacctgcttcacccggcgatctccattcgannnnnnnnnnnnnnnnnnnnnnnnnnnnnnnnnnnnnnnnnnnnnnnnnnnnnnnnnnnnnnnnnnnnnnnnnnnnnnnnnnnnnnnnnnnnnnnnnnnnnnnnnnnnnnnnnnnnnnnnnnnnnnnnnnnnnnnnnnnnnnnnnnnnnnnnnnnnnnnnnnnnnnnnnnnnnnnnnnnnnnnnnnnnnnnnnnnnnnnnnnnnnnnnnnnnnnnnnnnnnnnnnnnnnnnnnnnnnnnnnnnnnnnnnnnnnnnnnnnnnnnnnnnnnnnnnnnnnnnnnnnnnnnnnnnnnnnnnnnnnnnnnnnnnnnnnnnnnnnnnnnnnnnnnnnnnnnnnnnnnnnnnnnnnnnnnnnnnnnnnnnnnnnnnnnnnnnnnnnnnnnnnnnnnnnnnnnnnnnnnnnnnnnnnnnnnnnnnnnnnnnnnnnnnnnnnnnnnnnnnnnnnnnnnnnnnnnnnnnnnnnnnnnnnnnnnnnnnnnnnnngggatgtcccggtttttttgtttcgtcagttttgtcgggtggtggctccgccttacccgacctgcaaagtcccgtaggccgggtaagcgttagcgccacccggcaaagcggcttaaggtttcgccacaaacccaatcgcgtcgtacaccgctttcagggtttcggaggcgcgcgcgctggctttttccgcgccctctttcatcactttttgcaggaaagcttcgtcgttacggtaacggtgatagcgctcctgcaactcggtcagcatgccggaaacggcgtctgccacttcgcctttcaggtggccgtacatcttgccttcaaagtgcttttccagctcaggaatgctctgtccggtcacaccggagagaatgtccagcaggtttgacacgcccgctttgttctgcacgtcgtagcgcaccactggcggctcgtcggagtcggtcaccgcacgcttgagctttttcaccaccgatttcggatcttccagcaggccgataacgttgttgcggttatcgtcagacttggacatctttttggtcggctccagcagggacatcacgcgcgcgccggatttcggaataaacggctcaggcactttgaacacgtcaccgtaaagcgcattgaagcgctgggcaatatcgcggctcagctccaggtgctgcttctggtcttcacccaccggcacctggttggtctggtacagcagaatgtcggccgccatcagcaccggatagtcaaacagaccggcgttgatgttttcagagtagcgggcagacttatccttgaactgggtcatgcggctcagctcgccgaaataggtgtagcagttcagcgcccagcccagctgcgcgtgctctggcacgtgagactgaacgaaaatggtgctcttctctggatcgataccgcaggccagatacagcgccagggtgtccagcgtggctttgcgcagcttctcgggatcctgacgcgcggtgatagcatgcaaatccacgatgcagtaaatgcagtggtagtcatcctgcatgctcacccactgacgtaacgcacccatgtagttaccaatggtcagttcacctgaaggctgtgcgccactaaaaacgatgggcttagtcattattcaattcctgatgttcactgtgcgagagcccgagtgcgggcaacaaatctttgaagtggtcgaacacaacgtccggctcactcagcgtaatggcttcaccgtagttgtagccgtaggtcaacccaaccgacgggcaacctgccgctctggcagccagaatatcattgcgggaatccccgacaaagagcagctccgcaggcgctaaggataattttcctgccaccaacaatagcggttccggatgcggctttttattctgcacgtcatcgccgcccacaattacggagaagtatttcgcgatatccagcgcttccagcagaggcgcaacgaacggtgtcggcttgttagtcaccagtcccagcgggatgcctttggcatgtagcgcgctcagcgtttcagcgacatccgggaacaggaagctgccctcttcgacggtctcttcgtagaaacggtcgaacagtttgcgcagaatacgctgctgctcatcctggggaatatccgcgtggtcaacactcggtttaccttgcgcggaacgctgagaggcacgctcctgacgagcccaggacagcgcgcgctccatcagcacgtctgcaccgttaccaatccacgtcaccacgcgctcttcgcctgcaacggggagttcaagggcatacagcgcctgatcgacggcgcgggttaatcctggcgcgctgtcgaccagcgtgccgtcgaggtcaaatgctacaccccgaatagcctgcaatttatccatgacttaccttcgccagttcacggcgcatttcatcaatgacttttttgtaatccggttgatcgaagatggcggagcctgcaacgaacatatccgcccctgccgccgcaatctcaccgatattattgaccttcacgccgccgtccacttccagacgaatatcatagccagactcatcaatacggcggcgcacttcacgcagtttgtcgagggtctgagggataaatgactgaccaccaaagcctgggttgacggacatcagcaggatcacgtccagcttgtccatcacgtagtcgagatagctcagcggggtcgccgggttaaagaccagtcccgccttacagccgttctctttgatcagctgtagcgtgcggtcaacgtgttcggaggcttccgggtggaaagtgatgatgctggcacccgccgcggcgaaatcaggcacgatgcggtcaaccggtttcaccatcagatgcacgtcaatgggcgcggtgatcccgtagttacgcagtgctttaagcaccatcggaccgatggtcaggttgggaacgtagtggttatccataacgtcgaaatggacgacatccgcgccagccgcgagagctttggcagtgtcttcacccaggcgggcaaaatcggccgacagaattgagggggcaatcaaaaactgtttcatccgcatctccttgaaatgtgtttaccggcgggcaaaggctcagggtcgataaagcgccagaagttcgtccacctttttacgtgtgccgccgttgctgctaatgctacgccgcacttttacctgaaaatgcttcgcggctttgtaccattcgcgcgtatcaggcgtgtcgtgattcgaaattaacaccggaattcttttgctgaccagcttttccgccatctcagccagacgagcctgctcggccgggctgaagctattagtgtggtaggcggtgaaatttgccgtggcagacagcggcgcgtaaggcgggtcgcagtagaccaccgagtttacgcccgccagatccatgcactcttcataggagagacagtagaactcggcattctgcgctttttcagcaaagtgatacagctcgtcctgtgggaagtagggacgcttatagcggccaaacggcacgttaaactcgccacgcagattataccggcacagaccgttgtaaccatggcggttgagataaagaaacaacagcgcgcgacggaacggatcctggctttgattaaactcagcgcggaactgatagtagacgtccgggttgttgttctctggcgtaaacagcttccgcgcctcttccacatactcatcggtacgcagtttgacgatgttatagaggctgataaggtcgctgttgatatccgccaggatataacgagaaaaatcggtattcaggaacaccgatccagcacccacgaagggctcgataagacactcgcctttcggcaggtgctttttaatatcgtcgagcagggggtatttcccccctgcccatttcagaaaagcgcgattttttttcatgctgactaactgattacaccttctccggctgtggagaaagctccgacagcatcctgcgctttaaacattacttcagatcggcctgcacctgatgaatcggcttcgcccacgggtttttcgcctgcacgtcggctggcagcgtggaaacggcacgttttgcttcatctttggaagcataaataccactcaccagcacataccacggttgaccgttacgggtcgtctgataaaccacgtagtttttcagattcgatttcttcgcccaggcgttgaggttgtcatagttagacgaactgctcagctgaagggtgtagttgctggaagaggccgactgcaaagaacccacgttgcccgtcgttttacctgatgcagcgcccgttttggctgcgggagccgcaggtgttgttgcagaaggtgttgttgcagaaggtgttgttgcagcaggcgcggttgtggtcgccgttgctttcggtgcagtggttgccgcaggcgttggcgctttaaccggctgggtcactgcaggtttggtctgcgctggcgctttcgtttctggcgcttttgccacggtttgcggtttcgtctcacgcttcggctcaatcacagcctgcttacgctcctggcgtggcgcagtctgcgtctggcgcggtttggtttccgttgtcgccgtttgctgctgggcattgctgccatgaactggcgcaacggtggctggttcagttggcagcgtggagttcaccacggcagcgttaacctgctcctgattctgcggctgcatcagcgcattgttcagatcgccctgaacttcaacacgctgctgaccttcaggcgtcgcaggcgcctggccctgagtcggggtcgcagagacaggcggcagagagatatcctggccagcgctggtgttacctgcggtctgctctgcggaagtggtgcccggcgcaggctgagcgccattcgcctggttgctcgcatcgttaccagacaggtcaatgctcttctcggcagacgccgtctgctcggtagaattggtagaaggtgcttttagcgcggacccaatgccgacaatcagcaagaccagcaccagaacgccaaggcccatcatgatgtactgacgggaggccggttttgccgctaccgcttttttacgtttgcgcggacgacgttcaacaggctgttcatccattaactcttcttcggattcatactcctcgtcttctcgctcatttcgcgcgttacggctacgcgaagggcgacgatcgtctgcatccagttcgacatcgtcaaaattgatctgcggctcgttatcacgttctgaagattgacgagaacgaccagtacgacgatcgctgggatcgggtttcagctcgtcttctggtttgaattcatccatttaacaccccactcaaaggcttctgccaacgactctgcatttacctgaagctaaaacgaccacctgttacagcggtctgacctttctagttgttacgcctgctgacaatcagcaatagcgccaagtacgacttcgtgcggcactccgccgcgcacttcacttttccctattgcaagcgggagtaccagacgcatctcacctgccaatacttttttatcgcgcatcatgtggggaaggtacgcctgagcagacatttcctgcggaccactcaccggcaagccagcacgtttaagcaacgcgatgatacgtgctgtctcttccggcctgaactgccccagacgttcagaggctcgcgccgccataaccattccggcagcgacagcttcaccgtgaagccagttaccgtagcccatttcggcttcgatcgcatgaccaaacgtatgccccagattcagtaaagcacgtaagccggtttcacgctcatctgcggcaacgacttctgctttcagctcacaacaacggcgaatacagtaggccattgcctgcccgtcaaggcgcagcagcgcatccatattctcttccagccaggtgaagaattccccgtcaagaataatgccgtatttgatcacttctgcaaggccggacgccagttcgcgcgctggcaaggttttcagacagtcgagatccactaccaccgaggcaggctggtagaacgcgccaatcatgtttttgccgagcggatggttaaccgccgttttaccgcccacagaagaatcgacctgtgagagcaacgtggttggaatttgaataaagcgcacgccgcgctgatagctggcggctgcaaaaccggtcagatcgcccacaacgccgccgcccagggcaagcagtgttgtatcacgaccatgcggtttttgcagaagtgcggtaaagacggtatccagtaccgtcaggcttttgtactgctcgccatcgggcagaatcacactgtcgaccttcacgcccgcctgctcaagcaggtgacgtacacggtcgagataaagcggagccagcgtctcgttggtgaccagcatcgcctgatcacccgctttcagtggtaagaaggaagctgggtcgttaaacaaaccagccgcgatggtgatagggtaactacgttccccgagagtaactgtaatcctctccatgacgcgacatccaccttaaatgcttttacccgcaggcgagtgtatataaagccagaatcagttgctttccagcatatgaataatctggtttgcaaccactttagcgctttgatcgtcagtacgaatggtcacatcagcaatctcttcgtacagaggattgcgttcatcggccaaagcttccagaacttcacgtggcggtgtttcaacctgcaacaacgggcgctttttatcacgctgcgtgcgtgccagctgtttttcgatggtcgtctcaagatagaccactacgccacgggcggagagacggttgcgggtttcgcgagattttacagagccgccgccagttgccagcacaatgccctgtttttccgtgagttcgttgatcactttttcttctcggtcacggaaaccttcttcgccttctacgtcgaagacccagcccacatccgctccggttcgtttctcaatctcttgatcagaatcgtaaaattccatattgagttgttgagctaactgacgcccaatagtgcttttgccggcacccataggcccaaccagaaagatattgcgtttctctgccattttttcggtactactaagactattcgttaatggtaatccccgctgcgcagacacccggcgtagcaggacatgaactgaaacctcatttgcaatagagcgagagtcagacgaaaaattatctcaatactccggcttgtttggcaactgattaaatcaccgttcccggcgcataaggaaataagacgtaagtccaactcaaatcggtactccttgtatgctaattcatgccccacgtcaaacatctgcaacaaactgaatgcaaaatcattgcggggatcgttacccattaatgaatactgaccagacgtggcgtgataaacaccactaactcgcgccgttcgttatcttttccgtcatggcggaacagctgacccagccacggaatgttgcccagcacgggcacgctgtcgcgtccggttttattcttttgcgaaaagatcccgcccagcgcgagcgtttccccactttttacctctacctgcgtttcgatctcctgcttatcgatcgccagcgtttcgccgtctgcctgttgcagcacctggccgggcatattttcactgatatgcagtttcaggcgcacgcgaccgcccggcaggaccaccggcgtgacctccatgcctaataccgcctctttaaattcaacggacgtcgccccgctctcgccgctggaaacctgatacggaatttcgctgccctgcttgatgctggccggctgcatgtgcgatgccagcagccgcgggctggcgatgatatccacctgctgcttttgctcaagcgccgacaactcaagatccagcatcctgccgttgatgcgcccgatgttaaaccctgcgtgggtggttgcactggccaccgacaggtccgcccccagcgtcgtgacctgacccaccttaccggcctccgttgcgtcagcgaggttccatttcacccccagttcacgcaggcttttttcactgatggtcacaatctgcgccgccagttccacctgctcgacgggcagatccatctgcacagcccagcgctggagcatatccaccaccgtctggttatccctgaccaggaaacggttggtgcgcttgtcgacggagagactgcctttcgggcttaagagcttttctgccgctttttgcaattcggctgcatccgcataagcaaacggaatgctgtgagagtgcagcggggcgtcaagcagacgctgggcccgctcctgctctttacgcgtctgttgctcccgttgccaggccgccgtatgcacataaaaaatgccgccctcttcccgcaataccagcccggcgctgttcactactgtctgaagcgcctgtctccagggcacccgcgttaaattcagcgaaagcgaaccgctgacatccggcgacaccaccagattgcgatcctcctgcgccaccagcgcctgtaatatctgcaccaccgggacatcatccaccagcagggtgaccggttttggcgtcgcggcccacaggggctggctgagtgccgccagtaacagccctatccttatcttcactttttttcgttccttctcgttgccatgtccatcgcttcggctcgcacatgtcgccgacatcaacggtcagttgttgtttatctatcgcgctcacccgccagcctgtcggtaaccgcacctgcgtttttacccggtaccaacgcttctgcccgtcctgcataaggccgatatccctgctgccgctgactatcccctgataccgccactggctgagctgcccggctgcgcaacgctcttccggcacagagaagggatcccgcatcccggtcaggaaaagcggagaaagcaggatcagcaaacgggctttactgcgcatgaccgatctccagttgcaggctgaggcgtaactgtttgccttgtggggtgatggaaaacgcactcacccgcgcgttctcaagcgccagccgggaaaagagcgccgggacggcaccccaggaggcatccagcgccagctctcccccacgctgctgcggcttccagtacaccagccttgcgccctcacgctgaaaagccaggggagaaaagggctgcgagggcgtcacttgcctaaccactactcgccgtccggcctctggccacagcgaggcgttgattcgcttcgcactgatggcctgcgcctgaatatcggcgtaacgcagagcagcgggcctgagcagcagtccccaaattgccaatgcaacaagccccgacgcgatcaaccagcaaaggacgcgccgggaagggcgtgcatcagcccagcgttgataccagatacccacggctacctccggctatgcagttgaaaagagaacatccatcgccccaggctatcctgttgcagttcgcctgccggtccggggctaaatcccgtcacccttttcagggcatcggtcatggcggagagcgctggcagtgaggtggtatagccggtcagggtcagcgagggtggctgataacgcagcgccgttagccacgcctgccggggcattgcgctggcaagggactccagcgcaggttgccaggccggatcaaacggcagcgaaggggttttctgccccgccgactgcggctgacgggctttcaataccttctgcaccgcacgtgtcccggccagttcgctctgcaacgcctgtaacgcgagactctgcgccgcccgcaggctgatactccccgccagcatcaccagcaatgagccggcaaacagcagtccccagaaacgcaggcgctgattacgttgctgccgacgccagggtaaaagattgggtatgctcattacggtgcctcgctcatggccagcgccagggcgacggtgtaatcagcaccgtattccggcaacggcggctggcacagcgtcaccgcttcccagggttcgcgcgcagcatcaaacacggcgatatcagaaggagaaagcgcaagcagcgccgccagttcattcaccgtcgccgcttctgtggtgtagcgccgcccccactggtgacgcatcgcccatagccactggtgttgatctctccaggcgacgcaccgggcaggggcaacagcagagagaagattagccagcgcgccggcatccggggcgattgctgccagacgcaaacgcagcgcgttcgccagcgtcaacagggtatcgacctctctgttttgcgctgcggtaacctgaaaagtgttgctgaaggtatcctgcgcgtagtcaaagcagagcgtatcggcgggcatctccagctcacgcgctaatgcggcgcctacccaggtgagctgttcgctgtcacgcaaggtaacggatggacggggcaacgcgcgttgcagaacgcgcgtcgccggaaatgagagaaaaacccgatgcgagtgcggcaatgtttttcgccagccacgtaatgcgttaaccagctgttctggcttaagtattttgccttccccgataacgccgtccgacagcggcaccgcccaccagcgccgtaaacgccagccggcccgctctctggtcagcgctaccgcaaccaccttatcctgttgaatatgaacgcctgtttgccacgttttaaaagccatgcttcacgatctccttatcgcccgtcggagtgacggctatatcaatgaatcaggcttgcctttatactaccgcgcgattgtttagaaactgcccaggctaaaccaaatgggaaatctccggtgaagttcgtaaagtatttattgatccttgcagtctgttgcattctgctgggagcaggctcgattattggtttgtacaaatatgtcgagccgcaactccctgatgtcgccacgcttcgtgatgtgcggcttcagatccctatgcaggtctatagcgccgatggtgaactgatggcgcaatacggcgagaaacgtcgtatccctctgaccttaaatcaaattccacccgtgatggtgaaggcttttatcgccaccgaggacagccgtttttacgagcaccacggtgtcgatccggtcggtattttccgtgcggcaagcgtggcgctgttctccggtcatgcctctcagggggcaagtaccattacccagcagctggcgcgtaacttcttcctcagcccggaaaagacgctgatgcgtaagatcaaagaggtgttcctcgcgatccgcattgagcaactgctgagcaaagacgagatccttgagctttacctcaacaagatctatctgggctaccgcgcctatggcgtaggggctgcggctcaggtctattttggtaagccgatcgatcagctcacgctgagcgaaatggcgaccattgccggcctgccaaaagcgccatccacgtttaacccgctctactcgctggaccgcgccaccgcgcgccgtaacgtggtgctgtcgcgtatgttgagcgaaggctatatcagccagtctgagtacgataaggcgcgcagcgacgttattgacgccaattaccatgcgccggaaatcgccttctctgcaccgtatcttactgaaatggttcgccaggagatggtgagtcgctacggtgataaagcgtatgaagatggttatcgcgtctataccaccgtgacccgcaaggtgcagcaggctgcccagcaggcggtgcgtaataacgtgatggattacgatatgcgtcacggctatcgcggcccgtccaacgtgctgtggaaagtgggtgaaggcgcatgggacagtaaaaaaatcacggattccctgaaagcgctgccgacctatggcccgctgcgtccggcggtcgtcacccaggccgatccacaggaagcagtggcgatgatggccgatggcacatccgtttcgctgcgcatggagggtgtccgctgggcgcgtccataccgttctgacacccttcaggggcctacgccacgtaaagtgaccgatgtcgtacaaaccggacaacaaatctgggtgcgtcaggtcggtgatgcctggtggctggcgcaggtgccggacgtaaactctgcgctggtctccatcaatccgcagaacggcgccgtgatggcgctggttggcgggttcgatttcaaccagagcaaatttaaccgcgcgacccaggcgctgcgtcaggttggttcgaacatcaaaccgttcctgtataccgcggcgatggataaggggctgactctcgccagcattctcaacgacgtgccaatttcccgctgggatgccggtgcgggctctgactggcagccgaagaactctccggcgcaatacgctggccctatccgtctgcgccagggccttggccagtcgaagaacgtggtcatggttcgcgcgatgcgtgcgatgggcgtggattatgcggcagagtatctgcaacgctttggcttcccggcgcaaaacatcgttcatactgaatctctggcgctcggctccgcgtcctttacgccgctccaggttgcgcgtggctactcggtgatggcgaacggcggcttcctggtcgatccgtatttcatcagcaaaatcgagaacgatcagggcggcgtactgtttgaagcgaaaccgaaaattgcctgccctgaatgcgatattccggtgatttacggcgacacgccaaaatccaatgtcctggaaaacaaggatatggaagatgtggcgatctctcaggaacgtcagaatctggcggtgccgcagcctcagctggaacaggccaatcaggcgctggtcgcccagagtggcgcgcaggagtatgccccgcacgtgatcagcacgccgctgtcgttcctgattaagagcgcactgaacaccaacatctttggtgaaccgggctggcaaggcaccggctggcgagcgggccgcgatttgcagcgccacgacatnnnnnnnnnnnnnnnnnnnnnnnnnnnnnnnnnnnnnnnnnnnnnnnnnnnnnnnnnnnnnnnnnnnnnnnnnnnnnnnnnnnnnnnnnnnnnnnnnnnnnnnnnnnnnnnnnnnnnnnnnnnnnnnnnnnnnnnnnnnnnnnnnnnnnnnnnnnnnnnnnnnnnnnnnnnnnnnnnnnnnnnnnnnnnnnnnnnnnnnnnnnnnnnnnnnnnnnnnnnnnnnnnnnnnnnnnnnnnnnnnnnnnnnnnnnnnnnnnnnnnnnnnnnnnnnnnnnnnnnnnnnnnnnnnnnnnnnnnnnnnnnnnnnnnnnnnnnnnnnnnnnnnnnnnnnnnnnnnnnnnnnnnnnnnnnnnnnnnnnnnnnnnnnnnnnnnnnnnnnnnnnnnnnnnnnnnnnnnnnnnnnnnnnnnnnnnnnnnnnnnnnnnnnnnnnnnnnnnnnnnnnnnnnnnnnnnnnnnnnnnnnnnnnnnnnnnnnnnnnnnnnnnnnnnnnnnnnnnnnnnnnnnnnnnnnnnnnnnnnnnnnnnnnnnnnnnnncggcaaaaccgggacaaccaacagttcaaaagatgcctggttctcaggttagtggcccggggggttgtcacctccgtctggattggttttgacgatcaccgccgcgatcgtggggcgcacgaccgcctctggcgcgattaaagatcagatttccggttacgaaggcggcgcgaagagtgcgcaacctgcctgggatgcatacatgaaggccgttctcgagggcgtaccagagcagccgctaacgcctccgccgggcgtggtgacggtgaatatcgaccgcagtaccggacagctcgcgaatggcggtaacagccgtgccgagtatttcatcgagggcactcagccaaccacgcaggcagtgcatgaggtgggtacggaattgattgataacggcgaaacgcacgagctgttctgacgccaacaaaaaagccgggtggcgactacgcctgacccggcctacaacgtcaatgcaaaacggcaaccttcggttgccgtttttaatggtggcgctacaaacgcccctgtcccttcagccactcccgcaccaggaacagtgcgctcacgttgcgcgcctcgttaaagtcaggatcttccagcaaatccatcagatgagccagcggccagcgaacctgcggtagcggttccggctcgtctccttccagcgattcaggatagagatcttccgcgacaacgatgttcattttgctggagaaataggacggtgccatgctcagctttttcaggaacgtcagctctttcgcgccaaaaccgacctcttctttcagctcccggtttgccgcttcaaacaccgtttcgcccgggtcgatcagtcctttggagaaacccagctcgtaggattctgtgccaacggcgtattcacgaatgaggatcaggtgctcgtcgacgatgggcacaatcatcaccgcttcacgcgaggaggggcgcatacgctcataaacacgacgcacaccgttgctgaactccagatccacgctttcgacattaaacagacgcgatttcgcgacggtttcaacattcagaatggtgggcttttgtaagggtttggtcatcttgacgggtctttgctgggtgaactggctttattgtgcgatacgccgcacggtttcggcaatgtcaattgctctttatttacatttatgcaacgtaactgtaggcgattctcatttcaaaacaaatgtcaagaggttgaaatgtttccaggaatttgctgatatcgcgccggaacaggctttgttatcattaccggtcactgggatgcgcgtcaacatgctcaagttagactccatacttgccgatagccgaccacagaatctcattcattgtacaaaaggtgcgactgacaacacctgtaagaagataagtaagatggggaaagcatgagcaccattttgatttttctcgctgctgtgctggcctgcgcgtcgattgcggtgtgggtattcaggcgccgcgtacatcgccgttatcggctgccctttttgaacgcgttcgccggggcaaacacgcgcaagctttcgccagaggaacgcagcaccgttgagcagtatctcgacacgctgaaccgatcccggctttcgcctggccctaccggcgccagcgccgcccccgtatcgctcaaccttaacgcccaaagcgacaccgttctgtgcgtgacgcgctccattacccgctacggcattacaaccgacgatcccaacaagtggcgttactatctcgactctgttgaagtgcacctgcctcccttctgggagcaatatatcaacgacgaaaacagcgtcgagctcatccataccgatacgctgccgctggttatttccctcaatggccatacgctgagcgaatatgttcaggaagcgccacgctttgcgctggaacgcgcaagcggaacgcaggcctctattcgcggtgaagagacagagcagatcgaactgctgaacatccgccaggaaacgcatgaagagtacgtcctgagccgcccggatggcattcgcgaagcggtgctgattgtcgcctcgttcctgctctttttcatctgcctgctgacgccggacgtgtttgttccgtggctcgcgggtggcgcagtactgcttctggccgccgggctgtggggcatatttgctccgccggcaaaaacgtcattacgcgaaattcactgcctgcgcggaaccccaaaacgctggggactgttcggtgagaacgatcaggaacatatcaacaatatctcgctcgggatcatcgatcttatctatccgcgccactggcagccgtggattgcgcaggaccttggccacaaaacggatattgatatctatctcgaccgccacgttgtacgccaggggcgctacttatccctgcacgacgaagtgaaaaacttcccgcttcagcactggctccgcagcgcggtgattgccggtggtgccgcgttaatcttcgtcatgctgctgctcttcgtgccgctggatatgccgattaaatttaccctgtcgtggatcaaaggggcgcaaactgtggaagccaccagcgtacagcagctcgaagaagcgggtgtacgcgtgggagatacgttgcgcctcaaaggcaccgggatgtgtaatatccacacgccgggcgcctggaacacgcgccagaactcgccgttcgcgccgttcgactgctctcagatcatctggaatgacgcctctccgctgccgctgccggaatcggatgtggtcaacaaggccactgcgctcacccagacgattaatcgccagctccatccaaaaccggatgatgattctcgcgtcagccctgccctgcgttcggctnnnnnnnnnnnnnnnnnnnnnnnnnnnnnnnnnnnnnnnnnnnnnnnnnnnnnnnnnnnnnnnnnnnnnnnnnnnnnnnnnnnnnnnnnnnnnnnnnnnnnnnnnnnnnnnnnnnnnnnnnnnnnnnnnnnnnnnnnnnnnnnnnnnnnnnnnnnnnnnnnnnnnnnnnnnnnnnnnnnnnnnnnnnnnnnnnnnnnnnnnnnnnnnnnnnnnnnnctgaaaacagaggatctctgttccgcccaggatgactgtatccggctcaagaacgcgctggtcaacctcggcaacagcaaagactgggacgcgctggtgaaacgcgccgaagcgggacgcctggacggtgtgaacgtgcttctgcgtccggtcagcgccgagtcgctggataacctggtggcgacctctaccgcccccttcgtgatgcgtgaaaccacccgtgccgcccaggcgcttaacagcccggcgcccggcggttttgtgattgccagcgatgaaggcagcgacctggtggatcaaccttatccacaggtttcgctgtatgactatcctgcccaggagcagtggagcgaattccagcgtctggcgcagatgctgatgcagacgccattcagcgcggaagggatcgtcaccaccctctttaccgacgccaacggcacgcgtcatattggcctgcaccgtatgccggatagcgctggcctgtggcgctatatagggacatccctgctgctgattgcaatgctggcgtgcattgtctggaacggttatcaggccgtacgccgctatcagcgttcccgcacgcggctggcagaaatccaggcctactacgaaaattgcctgaacccgaaactgatctcctcttccgagagcctgatcggataacgtccctgcgcgacaagttgtgctaccctgtcgcgcacgtttcttctggctggagttcccccttatgcatcttaatatcgactggcaggcggtcgataccgtcctgcttgatatggacggcacgctgcttgatctcgcctttgataactatttctggcaaaagctggtcccggaaacatacggtgaacagcaggggatctccccggcggaagcgcaggaattcattcgttcgcaatatagcgcggtgcagcatacgctaaactggtactgtcttgactactggagcgagcgactcggtttggatatttgtgccatgaccaccgcccagggcgcacgcgctgtactgcgtgacgatacggtcccgttcctggatgcgctgaaagcctgcggtaagcgccgcattttgctgacgaatgcgcatccccataatctggccgtgaagctggaacataccggtcttgcttcacaccttgatttattgctttccacccacacatttggttatccgaaagaggatcagcggttgtggcatgccgtggtggaagagaccggtttacagccggaacgcacgctgtttattgacgacagcgagccgattctggattctgcggccgcttttggcattcgctattgtctgggcgtgaccaatccggattccggcctggctgaaaaaagctatctgcgacatccggggctgaacgactatcgccggatgatcccctcactcaccgtgaaggagacgccatgaaagaaaaaccctctgatggggtaagactggataaatggctgtgggccgcccgtttttacaaaacgcgcgcccttgcccgtgaaatggttgatggcggaaaggtgcattacaacggtcagcgcagcaaaccgagtaagctggttgaactgaatgccacgctaacgcttcgccagggcaacgatgagaaaacggtggtggtgaaagccattaccgagcagcggcggcccgcaaccgaagccgttttgctgtatgaagagacggccgaaagcatagagaagcgcgagaaaaccgcgctggcgcgcaaaatgaatgcgctgaccatgcctcacccggaccggcgaccggataaaaaagagcgccgcgatctgatgaaatttaaacacggtgagagcgagtaaccctcacctgcacgagagatgaaaatggcccaacacgaccaattacaccgctatctgtttgaacaattcgccgtgcgcggcgagctggtcaccgtatccgaaacctggaaacagattctggaaaaccacaactacccgctgccggtgaaaaccctgttgggcgaactgctggttgccaccagcctgctgaccgccacgctgaagttcgctggcgatattaccgttcagttgcagggtgatggcccgatgtcgctggcggtgatcaacggcaataaccaacagcagatgcgcggcgtggcgcgcgttcagggcgatattcctgaaaatgcggatctgaaaacgctggtcggaaatggctacctggttatcacgatctcgcctgaagagggtgagcgctatcagggcgttgtcggtctggaaggcgacacgcttgccgcctgcctggaagattacttcatgcgttccgaacagctgccaacccgcctgttcatccgcaccggtgaagtggatggtcagcctgctgccggtggtatgctgcttcaggttctgcctgcgcaggatgcgcagaccaatgatttcgagcatctggcaacgctgacggaaaccatcaaagcggaagagctgttcaccctgtcggcgaccgacgtgctgtggcgtctgtaccacgaagaagaagtgacggtttacgatccgcaggatgtggaatttaagtgcacctgctctcgcgagcgttgtgctggcgccctgaaaacgctgccggatgaagagatcgacagcatcatggcggaagacggtgagatcgatatgcactgtgattactgcggtacgcactacgtgttcaattccatggatatcgcggagatccgcaataacgcctctccagcggacccgcaggttcactaaacctctttcccctcaccctaaccctctccccaacggggagagggaacttgaacaccctcacccctttgggtgagaggtaaaaaacgccacccaagctgaatcgttttcccaatgtaacccttacgtaattttcttacatgtatgcgattacattcacattcttctggataaattcaccagagattaaccttttaagaacattttccccatccaaaaagcgattcctgcgataatctgcccgccctgtgactggagtcgcagcgttttccgttagtaagggttttgaccagatacgtaaatctatgagccccgtcgcggttaacatccccagaaaaaccctacaattttaggcagtacatattggctaaggagcagtgatatgcgtgttaatggtttaaccccgcaagatctcaaggcttatggtattcacgacgtccaggaagtggtctacaaccccgattacgatacgctgtatcaggaagagctcaatccggcactggaaggatacgagcgtggtgtgttgacgaacctgggtgctatcgccgtcgatacgggtatttttaccggtcgttcgcctaaagataagtatatcgtccgagacgacaccacccgcgatacgctgtggtgggctgataagggcaaagggaagaacgataacaaaccgctctccccggaaacctggcagcatctgaaaggacttgtcacccatcagctttccggcaagcgtctgtttattattgatgcgttctgcggcgctaacgccgacacccgtctctccgtacggttcattactgaagtggcctggcaggcgcatttcgtgaagaacatgttcattcgtccgaccgatgaagaactgcaagacttcacccctgactttatcgtgatgaacggcgcgaaatgcaccaacccgcagtggaaagagcagggtctgaactccgaaaacttcatcgccttcaacctgaccgagcgtatccagctgatcggcggtacctggtacggcggcgaaatgaagaaagggatgttctcggtcatgaactacctgctgccgctgcgcggtatcgcctccatgcactgctcggcgaacgtcggggaaaaaggcgatgtagcagtgttcttcggcctttccggcaccggtaaaacaacgctgtccaccgatccaaaacgtcgtctgattggcgacgatgaacacggctgggatgatgacggcgtgtttaactttgaaggcggctgctacgcgaagaccattcgcctgtcggaagaggcagagccggatatctaccacgcgattcgccgcgatgcgctgctggaaaacgtcaccgtgcgtgccgatggttctatcgacttcgacgatgcctcgaaaacggaaaacacccgcgtctcttacccgatctaccacatcgagaacatcgtcaagccggtatcgaaggcgggtcatgccacgaaggtgattttcctgaccgcggatgcgttcggcgtgctgccaccggtttcccgcctgaccgccagccagacgcagtaccatttcctctccggctttaccgctaaactggcgggtaccgagcgcggtgtgaccgagccaaccccaaccttctccgcctgcttcggcgcggcgttcctgtcgctgcacccaacgcagtatgcggaagtgctggtgaaacgcatgcaggcatccggcgcccaggcgtacctggtgaacaccggctggaacggtacgggcaaacgtatctccatcaaagatacacgtgccatcatcgacgcgattctggatggttcgctggataacgctgagacctttacgctgccgatgttcgatctggcgatcccaacagcgctgccgggcgtggatacgcgtatcctggatccgcgtaacacctacggttcaccggaacagtggcgtgagaaggctgaatcgctggcgaaactgtttatcgaaaacttcgagaagtataccgacaccccggccggtgctgcgctggtgagtgcgggaccaaggtaaaagcnnnnnnnnnnnnnnnnnnnnnnnnnnnnnnnnnnnnnnnnnnnnnnnnnnnnnnnnnnnnnnnnnnnnnnnnnnnnnnnnnnnnnnnnnnnnnnnnnnnnnnnnnnnnnnnnnnnnnnnnnnnnnnnnnnnnnnnnnnnnnnnnnnnnnnnnnnnnnnnnnnnnnnnnnnnnnnnnnnnnnnnnnnnnnnnnnnnnnnnnnnnnnnnnnnnnnnnnnnnnnnnnnnnnnnnnnnnnnnnnnnnnnnnnnnnnnnnnnnnnnnnnnnnnnnnnnnnnnnnnnnnnnnnnnnnnnnnnnnnnnnnnnnnnnnnnnnnnnnnnnnnnnnnnnnnnnnnnnnnnnnnnnnnnnnnnnnnnnnnnnnnnnnnnnnnnnnnnnnnnnnnnnnnnnnnnnnnnnnnnnnnnnnnnnnnnnnnnnnnnnnnnnnnnnnnnnnnnnnnnnnnnnnnnnnnnnnnnnnnnnnnnnnnnnnnnnnnnnnnnnnnnnnnnnnnnnnnnnnnnnnnnnnnnnnnnnnnnnnnnnnnnnnnnnnnnnnnnnnnnnnnnnnnnnnnnnnnnnnnnnnnnnnnnnnnnncgcacgaatgctcaaaccgccccgctcgctggtgccaatttccagcagtccgttatggttatcaacaatacgctgcacaatcgccaggcctaagccggttccgctggtgctgcgcgcgctgtcgccacgcacaaatggctggaacaggtgcttacgctgctcaggcttgatgcccgggccatcgtcttccacctggaaccaggcgcggttgagttccgtaccgctgctgactttgatccagccgttgccgtaccgcgccgcgttaaccaccatattcgccaccgcgcgtttaatggagagcgggtgcatacgtacctgaatctcgcctgcctgaaggtcggtcgcaatttcacgttcgtagccgctttcggcggcaaccacttcgcccagaaccgcgttcagatccgccatctccatcggcatctcctgcccggtgcgcaggtagtcgataaactgctcgatgatggcgttacactcttcgatatccttgttgatggactctgcaagataaccatcctgctcgcccatcatctctgttgccagccggatacgcgtcagcggggtgcgaaggtcatggctgaccccggccatcagcagcgtacggtcgtccgccagctgtttaacgcctgccgccatgtggttaaacgcacgcgttaccgagcgcacttccgatgcgccatactcgcgcagcggcggtgggataatacctttaccgacctgcaatgccgcatgctccaggtcgaccagcggtcggttctggatacgaataaacagccatgcgccgccgatggccagcagcatgatcgccagggtgtatcggaacagcggcgagaagtcgccctgatgaatctcggtgagcggaacacgcacccaaatgttgggtgacagccaggttttcagccagacaaccggcgagcttttattgacctcaacgcgcacttccgtcgggccgccaagctgctgcgccatctgctgactgaggaattcatagtgctgcgcccagcgcaggccggcatcttccgccgcttcgttcgagtagagagaaatgcccagctcacggtagatttcccgacggaacgccgggggaacaaccaactgcgtgccgtcctccagttgcagtttgtcggtcatcagcatacgcacttcgtatgccagcaccttattaaactgctgaaggctcggcaggattgcaaagttcagcaccaccaggtaggtcgtcaccaggctgacgaatagcagggtgacgatcaataacagcgtgcgggcaaacgaacttcgcggcgagaagcgcattcgcctcatgctttagagccgtccggaacaaacacgtagcctagaccccacacggtctgaatataacgaggatgcgccggatcttcttccaccatgcggcgcagacgagagatctgcacgtcgatagaacgctccatcgcggagtattcacgaccacgcgccaggttcatcagcttgtcacgggagagcggctcacgcgggtgactgaccagcgctttcagcaccgcgaactcgccgctggtgagcggcattggctcatcttcacggaacatttcacgggtgccgaggttcagcttgaacttaccgaatgcaatgacggcctcttcctgagatggcgcgcccggcagctcgttcgcctgacgacgcagcacggcgcgaatacgcgccagcagttcacgcgggttaaacggctttggaatgtagtcatcagcgccaatctcaaggccgacaatgcggtcaacttcttcacccttcgccgtcaccatgatgatcggcatcgggttgctctggctgcgcagacggcggcaaatagagagcccgtcttcgccaggcagcatcaggtccaacaccatcaggtggaaagattcacgcgtcagcagacgatccatctgttccgcgttcgcgacgctacgaacctggaagccctgctcggtcagataacgttccagcagcgcacgcaggcgcatgtcgtcatctacgaccagaattttgtagttctcttgcattgtgtgtactcccaaaggttcggataagcctggaacagcgtattctaaaaaagtgcacgggttcgaccagcaaattctggtataaattctagacgaaattgttacaaagcatatttaacagcagcttatctgttcatttcatcacataaatcattattaatcttgtctgttacactgtgcgctacgtattgtgcgcaaagacagttaaccggcattaaaggctgcaccatgaaaacgcctctgatcacccgtgaagggtacgagaaannnnnnnnnnnnnnnnnnnnnnnnnnnnnnnnnnnnnnnnnnnnnnnnnnnnnnnnnnnnnnnnnnnnnnnnnnnnnnnnnnnnnnnnnnnnnnnnnnnnnnnnnnnnnnnnnnnnnnnnnnnnnnnnnnnnnnnnnnnnnnnnnnnnnnnnnnnnnnnnnnnnnnnnnnnnnnnnnnnnnnnnnnnnnnnnnnnnnnnnnnnnnnnnnnnnnnnnnnnnnnnnnnnnnnnnnnnnnnnnnnnnnnnnnnnnnnnnnnnnnnnnnnnnnnnnnnnnnnnnnnnnnnnnnnnnnnnnnnnnnnnnnnnnnnnnnnnnnnnnnnnnnnnnnnnnnnnnnnnnnnnnnnnnnnnnnnnnngagatggattacctgtggcgcgaagagcgtccggaagtgaccaaaaaagtcacctgggcagcaagcctgggcgaccgcagcgagaatgcggactaccagtacaataaaaagcggctgcgcgaaatcgatcgccgggtacgctacctgacgaagtgcctcgagaatctcaaaattgtcgattactccccgcagcaggaaggtaaagtcttcttcggcgcgtgggtcgaaattgaaaacgacagcggcgacaccctgcgttttcgtatcgtcggctacgatgaaattttcggtcgtaaggattacatttctatcgactcacccatggcccgcgccctgctgaaaaaagaggtaggcgatttagccgttgtccagacgcctgcgggtgaagcaagctggtacgtcaacgaaatcgagtatgttaaatagtccgagagcgccctccccggctggcattttttggtgtcagcccgtataactatccccctgattttcgatccacaagatgaactgaccatgatgaaagagtcgctctgccgcattattgcgggtgaacttcaggccagagccgaacaggtagaagctgccgttcgcctgcttgatgaagggaacaccgtgccgtttattgcacgttatcgtaaggaagtcaccggcggtctggatgacacgcagctgcgaaacctggagacccgtctgggctatcttcgcgagctggaagaccgacgtcaggcgatcctcaaatctatcggcgagcagggcaagctgaccagtgacctggaaaaagccattaacggtaccctgagtaaaaccgagctcgaagacctctatctgccgtacaaaccgaagcgccgcacgcgcgggcagattgcgatcgaagccggccttgagccactggccgatctgctgtggaacgagccgtctcacgatccggaaaccgaagccgccaaatttatcgacgccgataaaggcgtagcggacaccaaagccgcgctggacggcgcgcgctatattctgatggagcgcttcgccgaagacgcggcgctgctggccaaagtgcgtgattacctgtggaagaacgcgcatatcgtctccaccgtggtgtccggcaaagaggaagaaggcgcgaaattccgcgactacttcgatcaccacgaacccatttctaccgcgccgtctcaccgcgcgctggcgatgttccgcggccgtaacgaaggcgtgctgcaactctccctgaatgccgatccacagtttgacgagccgccaaaagagagccactgcgagcagatcattatcgaccatctgggcctgcgcctgaacaacgccccggcggacagctggcgcaaaggcgtggtgagctggacctggcgcatcaaggtgctgatgcacctcgaaaccgagctgatgggcaccgtgcgcgagcgcgccgaagacgaagcgatcaacgtcttcgcccgtaacctgcacgacctgctgatggcggcgccagctggcctgcgcgccaccatgggtctcgatccgggtctgcgtaccggcgtgaaggtggccgtggttgacggcaccggcaagctggttgccaccgacaccatttacccgcacaccggtcaggcagcgaaagcggctgtcgtcgtcgccgcgctgtgcgagaagtacaacgttgagctggttgccatcggtaacggtacggcgtcccgagaaactgaacgtttctatctcgacgtgcagaagcagttcccgaaagtgacggcgcagaaagtgatcgtcagtgaagcgggggcatctgtctattccgcctcggaactggcagcgcaggagttcccggatctggacgtttccctgcgcggcgcggtctctatcgcccgtcgtttgcaggatccgctggcggagctggtgaagattgacccgaaatccatcggcgtgggccagtatcagcacgacgtgagccagacgcagctggcgcgtaagctggatgcggtagtggaagactgtgttaacgccgtcggcgtggacctgaacaccgcttccgttcccctgctgacccgcgtggcgggcctgacccgtatgatggcgcagaatatcgtcgcctggcgtgatgagaacggtcagttccagaaccgccagcagctgctgaaggtgagccgtctggggccgaaagcatttgagcagtgcgcgggcttcctgcgcatcaaccacggcgataacccgctggatgcctctaccgttcacccggaagcctatccggttgtcgagcgtatcctggccgccacccggcaggcgctgaaagacctgatgggcgacagcagcgcgctgcgtaacctgaaagcggtggatttcaccgacgaacagttcggcgtgccgacggtcaccgacatcatcaaagagctggaaaaaccgggccgcgatccgcgtcctgagtttaaaaccgcgacctttgctgagggcgtagaaaccatgaacgacctgctgccgggcatggtgctggagggggcggtaaccaacgtcaccaactttggcgcgtttgtggatatcggcgtgcatcaggatggtctggtgcatatctcttccctcgccgacaagttcgttgaagatccgcacaccgtggtcaaagcgggcgacatcgtgaaggtgaaagtgctcgaagtggatctccagcgcaagcgtattgccctgaccatgcgtctggacgagcagccgggcgacactaacgcgcgccgtggcggtaatggcggtggccgtgaacagcagcgtccggcagcgaaagccgcgaagccacgcggacgtgacgcacagccggcgggcaacagcgcgatgatggatgcgctggcagcggcgatgggtaagaaacgctaatgctgtaaatgcccggtggcgcgacgcttaccgggcctacggttttgtaggccgggcaaacgcagtgccgcccggcaagcaggccgcagggaattaaaataaatatgttgtatccatatttaaaccacgaattatcacctcattaacaaatagccctctttttattttcacctcaatttcgaaaatattgagcaaggtcaagcagaccgcaaattaatacgattaacaacatcccgtcacatttttattattgctgataaaaactattctcattatcatcgcagtgtagattatttaacctatcgtggaatcaggcgctatgcaattcactccagacagtgcgtggaaaattatcggttttacccgtgagataagcccggcctatcggcagaagctcctgtcactgggcatgctacccggctcatcattccaggttgtgcgcgttgcgccgttgggcgatccagttcatatcgaaacccgacgcgttaatctggttctgcgtaaaaaagatctcgcattaattgaaattgaatctttatcccgttaacaagccagcggtttcagtgagtctactacaatgaaaaaattaactattggcttaattggcaatcctaattccggcaagacaaccttatttaatcagttaactggcgcacgccagcgtgtgggaaattgggcaggcgtgacggttgaacgcaaagaaggccagttcaccacgacagataatcaggtcacgctggttgatttaccggggacctattccctcaccacgatttcatcccagacctctctcgatgagcaaattgcctgccactatattctgagcggcgacgcggatctgcttatcaacgtggtggatgcctctaacctcgaacgaaatctgtatctcacgttacagctgctggagctgggtattccctgcatcgtggcgcttaacatgctcgacatcgcggagaagcaaaagctgcgcatcgacgtcgatgccctctccgcccgtctgggctgcccggtggttccgctggtttctacccgcgcgcgcggcattgacgccctgaagctggcgattgaccgccacacgggcaatgccgacgtcgaactggtgcactatgcccagccgctgctgcgcgaagccgggcagctggcgcaggagatggacaacagcatgcccgccagacaacgtctgtggcttggcctgcaaatgctggaaggcgatatctacagccgcgcctacgcaggcgatgcggcggataagctggacgtcgcacaggctcgcctgagcgacgagctggacgatcccgctctgcacattgcggatgcgcgctatcaggccatcgccgctatctgtgacgtggtcagcaatgcattaaccgctgaacccagccgcttcaccgccgccgtggataagattgtgctcaaccgcttcctcggtttgccgatctttttactggtgatgtatgtgatgttcctgctcgccattaacatcggcggtgcattgcaacctatctttgatggcggctctgtcgctatcttcgtgcacggtattcagtggctgggctacaccctccacttcccggaatggttgaccatctttcttgcgcaggggatcggcggcgggatcaataccgtcctgccgctggtgccgcagatcggcatgatgtacctgttcctctccttccttgaggattccggttacatggcgcgcgccgccttcgtgatggaccgcctgatgcaggcgctggggctgccgggcaaatccttcgtgccgctgattgtcggctttggctgtaacgtgccgtcagtcatgggcgcgcgtacgctggatgccccgcgcgaacgcctgatgaccatcatgatggcgccgttcatgtcctgcggcgcgcggctggcgatcttcgcggtctttgccgcggcgttctttggtcaggaaggagcgctggccgtcttttccctgtatgtgctgggtatcgtgatggctattctcaccggcctgatgctgaagcacaccatcatgcgtggcgaagcgtcgccgttcgtgatggaactgccggtttatcacgttccgcatctgaaaagcctgattattcagacatggcagcgcctgaagggcttcgttctgcgcgccggtaaggtgattgtggtggtcagcattttcctgagcgccctgaacagcttcactctgagcggccaggccgcggacaacattaatgactctgccctggcctccgtcagccggatcattacgccggtcttcaaaccgattggcgttcaggaagacaactggcaggcaaccgtgggcctgttcaccggcgcgatggcaaaagaggtggttgtcggcaccctgaacacgctttacaccgcggaaaacatccaggaagaggagtttaatccggcagcgttcaacctcggcgatgaactgcttggcgcggtggaagaaacctggcagagcctgaaagacaccttcagcctgagcgtactggcgaacccgattgaagccagcaaaggcgacggcgaaatggcgaccggagcaatgggcgtgatgggccagaaatttggcagcgcgtcggcggcctacagctacctgatcttcgtcctgctctatattccgtgcatctcggtcatgggcgccattgcccgtgagtccagccgcggctggatgggcttctccattctgtgggggctgaacattgcctactcgctggcgaccgtgttttatcaggccgtcaattacagccagcatccgcgctacagcctggtctgtatcctcgcggtgatcctgtttaacgtgatggtgattggcctgctgcgccgggcgcgtagccgcgttgacgttaacctgctggcaacgcgcaaaaccccgacgacctgctgtagcagccctgcgggcgactgtcactaaggggaagaaagatggcatcgttgattcaggttcgtgacttactggcgttacaggggcgaatggaggcgaagcagctcagcctcagcctgcatacgccacagccgatgatcgatgccatgctggaaaggctggaggccatggggaaagccgtgcgcattcaggaagagccggacagttgtctgtccggcagttgtaagagttgtcctgaaggtaaagcctgtctcagggagtggtggacgcttcgctgataaaaccggacagcgccgaacaaaactcagcaggatgagagatgaacggcgcatgtgccgctttggcaaccaccattgatttactctccggccacagcgcatccagcagcggaaccaccttgcgcggaaccagtccatccagatagccataaatacgcagatgcggcaccgttaacgacgccagcggctcgcgcagatcggccgttttcaggatctccagccctccgttcagcacctcaacctccggcatcggcagagaaagcaccgtctgcttcagcgtccgcgcatcctgacgggcggtttctgttcccatcgtctgtaatgccaggaaacgctccaccgtccgctggaagtcttcgctcagctgatgctggaacccggccagcacctcaggtttgatgcccggccacgcctcgcgggcgctgaaacagggtgatgaggcaacggtgatcagcgcctggacccgctcaggatggcgcagcgcaatctggcttgccaccagcccccccaggctccagccgagccagacggctttttgcggcgccgcttccagaacctgctccgccatgtcgtcgagcgtcatcgcgccgtagccgtggctgcggccatagcccggtagatccaccaggtgtaccgtgaattgcgaggccagttcctcacttatgcaacgccacacttcggcgttcagtccccatccgtgcagcagcacaagatgacaatttcccgtcccaacggtctgccaccacagcgtcttcatcagttaacgttctcttttttcacatggaggttgcgtatgctaacagtgcccggcttgtgctggctatgccgaatgccacttgcgatgagcgcgtggggcgtctgttccgtttgcacgcgagcactgggttacctgaagggctgtccgcaatgcggcttgcctgccgtaagccagacgctcccctgcggccgttgcctgaaaaaagcgccgccgtggagcgcgctggtggcggtggatgattacgttttgccgctgagtcgtctggttcatcagtttaagttttccagccagactgcactggcgcagcccctggcacgcctgttgttactggcggtattacaggcgcgaagaacgcgcgggctgccgccggtcgacacgcttgtgaacgtgccactgtttcagcgtcggcactggcggcggggatacaatcagagcgacctgctgtgccgtccgctcgcccactggctgggttgccggtacccagcctctgcgctgaaacgtactcatgccactgccgttcagcaccggctcaacgcccggtcgcgcaaaaggaaccagaaaaacgcctttcgccttgaattgccggtcaacggcctccatatcgcgattgtggatgatgtcgtcaccacgggcagtaccgtggctgaactttcccgactgcttttgcaaagcggcgccgcgtcagttcaggtatggtgtctgtgccgtaccttgtagcccttcttcaatgggcgtatgattatacccaggtaatttagtcaactattaggccaaagctatgatccgtatttccgattctgcacaagcgcactttgccaaactgctggcaaatcaggaagaagggacgcagatccgcgtgtttgtgatcaatccaggcactccgaatgcagaatgtggtgtctcttattgtcctccggatgctgtggaagcaactgacactgcccttaaatttgaacagctcaccgcgtacgttgatgagctgagcgcgccgtatcttgaagatgcggagattgatttcgtcactgaccagctgggttctcagctgacgctgaaggcgccaaacgcgaagatgcgtaaagtctctgacgatgccccgctgatggagcgtgtggaatatctgctgcaatcgcagatcaacccgcagctggccggccacgggggacgtgtttccctgatggaaatcaccgaagatggtctggcgatcctgcaattcggcggcggctgtaacggctgctccatggttgatgtaaccctgaaggaagggatcgagaagcagctgctgaacgaattcccggaactgaaaggcgtgcgcgatctgaccgagcaccagcgcggcgagcactcttactactgattcagtacccgtctgtattgcccggtggcgctgcgcttaccgggcctactttttcttgcctccccctctgtatgttgacctgcgtctcataattcaaattttgcctccctgggtgattctcaatcaccgcatgttacccgtatcattctcgtgggcactcaacacccttataacagccgactaaacttaatggtttcgcaggcatcagtatgagtgccgttaacactctgttcccagttgggacaaccggaatttgtcgttgaaacaatgacgttacccataacaattcaaaggccaggtcaatcatgccattagtcatcgtcgctatcggtgttgtgttattactgctcttgatgatccgcttcaaaatgaacggatttatcgctctggttctggtggcacttgcagtcggtctgatgcagggaatgccgctggttaaagttatcagctccattaaagccggtgtcggcggtacgctcggcagcctggcgctgatcatgggcttcggcgccatgctcggtaaaatgctcgcggactgcggtggcgcacagcgtattgccaccacgctgatcgacaaatttggtaagaagaacattcaatgggcggtggtgttaaccggttttaccgtcggtttcgcgctgttctatgaagtgggcttcgtgctgatgctgccgctggtgttcaccatcgccgctgccgccaacatcccgctgctgttcgtgggtgtgccgatggctgcggcgctgtccgtcacccacggtttcctgccgccgcatccgggcccaacggctatcgccaccatcttccatgccgatatgggtaaaaccctgctgtttggtacgattctggcgatcccgacggtgattctggcaggcccggtgtatgcgcgcttcctgaaaggcattgataagcctatcccggaagggctgtacagcgccaaaacctttactgaagaagagatgccaggctttggcgtcagcgtctggacctcactggtaccggtgatcctgatggcgatgcgtgccatagcagagatggttctgccgaaaggtcacgcgttcctgtccgttgcggagttcctgggcgacccggtgatggcgacgctgattgcggtcctgatcgccatgttcaccttcggtcttaaccgtggccgttccatggatcagatcaacgacacgctgacttcttccatcaaaatcattgccatgatgctgctgatcatcggcggtggcggcgcgttcaagcaggtgctggtcgacagcggcgtggataaatacatcgcggccatgatgcatgaaaccaacgtctccccgctgctgatggcatggtctattgccgcggtgttgcgtatcgcgctgggctctgcgaccgttgcggcgattaccgcgggcggtatcgttgcgccgctgattgcgaccacgggcgtaagccctgagctgatggttatcgcggttggttccggtagcgtgattttctcccacgtgaacgatccgggcttctggctgttcaaggagtacttcaacctgaccatcggtgaaaccatcaagtcctggtccgcgctggaaaccatcatttcggtgtgcggtctggtcggggtgctgctgttgaatatggtggtttgatgtattaagtcgggtggcggctatgccttacccgacctacttaatgcacgtaggcccggtaagcgttagcgccaccgggcaataaaaaacccgccactggcgggttttttatcacttcttcgcggctgcttttcgccgtttatccaaatccttaatcaacctgttcaccccgtcatcggcaaacatcgcttcaagcgttgtggacagcttgcgacgccagtttttgtactgatagctggtgccggggatgtttaccggctccgccatatcaatccagtcttccggttgcagaccgagcaacgcgctgttgctgtcggcaatatagcgctgtaagccacggttaagcgttggcgtcatcgacatcagcgacgccttatgcccggcgcgcttcggcagacagccatgcttatgcagcgcatccagcagcccctgcttcgccagctcgcgatcctgatacagcccacgcagaacctcttcatccgggtagagacccagcgttttgccgagcgtcaggtcaccgctttcccagtagcctctgagcgtaggaagatcatgcgtcgtcgcgactgccattgactgttcagggtacgctttcggcgcgcggaaggttttctcatggtcgttttcaaaatagagcactttgtaggagtaaaccccgctgtcgcggagcttgctgacaatttccaccggcacggtaccgagatcttcgccaatcaccatgcactgatgacgtttactctccagcgccaggattgagagcagatcgtccaccggatattgcacgtacgccccgtggtcagccgtttcaccgtacgggatccaccacaggcgcagcacggacatcacgtggtcgatacgcaacgcaccgcagttctgcatgttagcgcgcagcaggtcgataaacggctcgtaggcacgcgccgccatcacgtgcggatccatcggcggtaagccccagttctgaccgagcgggcccagaatatccggcggcgcccccacagaagctttcaggcagtaaagttcacggtcacaccaggtttccgccccgccttccgccacgccgacggccagatcgcgatacaacccgatcggcatgttatagccctggctcacctgccagcaggcggcaaactggctgtacgccagccactgcaaccagagatagaaatccacctcgtcggcatgcgtctcacagaatgccttcacttccggggtatcaacggactgataggcttccggccacaccggccagccccagcgcatctcgtcctcctgaacctgatacgcatgcagcgcatcaaacgctgcctgccagtaaaggctctcgccttcctgcatcacaaactggcggaaggctgccatctgctcgtcgtcacgcttcgcaaagcccttccaggccagacgcagagccgccattttcagcgcggtaacggaggcgtaatcaacccagtccgcatcgcgggcctgtttcagcagctgttgcgtggtctcaagcttccaccacgcctgcgcctctttgctgtttttgaaatcgtctaatgcgttaacgtcgatgtaaatcacgttcagccagcgacgggaagacgggctgtacgggctggcgctttccggattcgccggatagagggcgtggatcgggttgaggccgatgaacgcgccgccgcgctcaccaacagatgccagcatctttttcaggtcgccaaaatcgccaatgccccagttgctgtccgaacgcagggtaaagagctgcacgcaggcgccccacagctttttgccttcacgcagcgcctgcggctcatagcagcgctttggcgccacaatcacccgacagtgaaaacgctggtcgtcccgtgtaagcgtaagcgtgtggtagccctccggcagcttcgccggaaggttgagggttttgccgccggtggcatggcctttgtgctgatgcccctcttcggtggtgagcagccagctgaactcgccgcgcccttccaccgccagcggcatctttttgcccgcggtaaagaccttgacgttcggcaccggcgcacccgacgctttcgcgtcggttttgtgcatggcatccagcaaacgtcttttggtgtccgcaccaatagactgcggtttgccgtgcgcattgatgtaactgaggctaattcccgccgcctgcgcggcactgtccagacgtttactctccatcgcgcttccttagcgttttgcctgccagatacgagcctgataatcacggattgaacggtcagagctgaacataccgcagcgcgcggtgttcaggatacacgcgcgggtccaggcatcctggtcgcgatacagcacgtcgacctgcttctgcgcttcaacgtaagccgagaagtcagccatcaccaggtacgggtcgccgccctgtttgtccatgctgtgcagcatctggtcaaacgcgtgcttgtcgccgtcgctgtacttcccgctttccagctctttgagcaccgcatccagcactttatcttttttacgccatttcaccgggtcgtaccctttggctttgatggctttcacttcttcaacagtatggccgaagataaagatgttctcttcgccgaccttctcggcgatttcgacgttcgcaccgtccagcgtgccgacggtcagcgcgccgttcagggccagcttcatgttgccggtaccggacgcttctttaccggcggtagagatctgctcggaaatatccgccgccgggatcagcatttcagccgcagaaacgcagtagtccggcaggaacaccaccttcagcttgtcgcccactttcggatcgctgttgatcgccgccgccactttattaatggcaaggataatgtttttcgccaggtagtagcccggcgccgctttcgcaccgaacaggaacacgcgcgggacgcggtcggcctgcgggttctcgcggatctctttgtacagcgccagaatgtgcagcaggttcaggtgctgacgtttgtactcgtgcagtcgtttgatctggatatcgaaaatcgcattcgggttgatctcaattccggtgcgcattttcacaaactcggccagacgaaccttgttctccagcttaatggcgcggtactgctcgcggaacttcgcgttgtcggcctgtttttccaggttgatgagctggtccaggtcgttggcccactctttcttcagggtcttgtccagcaggccggccagcagcgggttgcactgcttaatccagcgacgcggcgtgatgccgttggtcacgttatggaatttggtcggccacagctggtggtattccgggaagagatctttcaccaccagatccgagtgcagcgcggccacgccgttcaccgcaaagccgctgaccacgcacatgttcgccatgcgcacctgcttgtcgtgcacaacggccagcttcgcccagacggccttatcgcccggccaggttttctccaccagcgttttgaactggtcgttaatcttgttgatgatctgcatatggcgcggcagcagcgttttcaccagcttctcatcccagcactcgagcgcttccggcatcagggtgtggttggtgtaggcgaaggtgcggctggtaatggcccaggcgtcgtcccagctcagctgatgctcgtcgatcagcacgcgcagcagctccgggattgcaatggtcggatgcgtgtcgttaagctgaataacttcgaagtccggcagctgagccagcttgcggcccgccaggtggtggcgacgcagaatatccgccacggagcaggcgcactggaagtactgctgcatcagacgcagctttttacccgccagatgattatcgttcgggtagaggactttggtcagcttctcggcgtcgatcccctgctgctcggcgcgcaggaaatcaccgtcgttgaatttggtcaggttaaacggatgcgcgtgcttcgcctgccacaggcgcagcggctgcgccacgccgttacggtagccgagtaccggcaggtcccaggcttcaccggtaatggtgaacgccggttcccagagtccctgcttcgtgactttcccgccaatcccgacctgcacatccagctgcgcgttgtggcggaaccacggataggtattgcggtgccagtcgtctggcgcttccatctgatggccgtcggcaaatgactgacggaacaggccgtactgatagttcaggccatagccaatcgccgactggcccacggttgccatggaatccaggaaacaggctgccagacgtcccagaccgccgttacccagcgccggatcaatctcttcttccagcagatcggtcaggttgatgtcgtgttctttcagcacgtcaccgacctcctgataccagccaaggttcagcagattgttacccgtcagacggccaatcaggaactccattgaaatgtagttgacgtgacgctggcctttcacgggcttcgtcacaggctgagcgtccagctgctctgcgagcgccccgctcaccgcctgccaccactggtgaggcgtcatttcgtttgcagcatgaaggccaaaacgctgccactgacgtgtcagggcagcctgaaattgagctttgttgaaagtaggctgtgacatagggaatcggcatcctgtagagagtaaaaacatttaacgctagtgtgcctggctcattgcgcctcttcctcctcctgtcggggattagacagggaggagtagcggggatgagcataaaagtgtgatcgaggccactgtgtgagtgtgcgcttcgctgaaaaagcgatcccggaagagcgtcaaagaaatgaaatgcagtttcggaggaaattaatcatcgctgaaatgattacttacgtagaataatatttccgcgcgtcgcgattattcagcacccctattaagccgatgcaactttccccgaagttaattaacttcagcgtcattatctctttctgaaaccagtttcagcgcaaccgcgacttatgcacacaagccagaagcagcgcggcatccagccatttacggaaagttccatcagtgatgagaatgttttgtgacagagtgcaaattcagagcctccaaacccagacataacttgcaatagttcctctattggccgaacttatagatattaattacgaagcgcaaaaaaaataaattctctcgttccccacagtgaagtgaaaactatgttgattccgtccaaattaagtcgcccggttcgtcttgaccatactgtggtccgcgagcgcctgctggctaaactttccggtgcgcataatttccgactggcgctggttacgagtcctgcgggttatggaaaaacaacgctcatttcgcaatgggcggcaggtaaaagcgatcttggctggtactccctggatgaaggggataaccagcaggagcgttttgccagctatttaattgccgcgattcagcaggcaaccaacggacactgcgtcaccagcgaggtgatggtgcaaaagcgccagtacgccagcctgtcctctcttttctcccagctgtttatagagctggccgaatggcatcgcccgctgtatgtggtgattgatgattatcatctgatcaccaacccggttattcacgagtccatgcgtttcttcctgcgccatcagccggaaaacctgacgctggttgtcctgtcgcgtaaccttccgcagttgggcattgccaacctgcgcgtgcgcgatcagctgctggaaatcggcagtcagcagctggcctttacccatcaggaagcgaagcagttctttgactgccgcctgacgtctccgattgaggcgtcggaaagcagccgcctgtgcgatgacgttgccggctgggccacggcgcttcagctgattgccctctccgcgcggcaaaacaacagcccgacgcatcagtccgcacgccgcctggcgggcatcaacgccagccacctgtcggattatctggtggatgaggtactcgacagcgttgacctctccacccgccatttcctgctgaaaagctccctgctgcgttccatgaacgatgcgctgattgtacgcgtcaccggcattgaaaacgggcagcttcagctcgaagagattgaacgtcagggtctgttcctgacgcgcatggacgatcccggcgaatggtttagctaccatccgctgtttggcagcttcctgcgccagcgttgccagtgggaactggccgcagagctgcctgacattcaccgcgccgccgccgaaagctggatggcgcaaggtttcccgagcgaggctatccaccatgcgctggccgccggggatgccggtatgctgcgcgatattctgctcaaccacgcgtggggactgttcaaccacagtgaactgacgctgctggaagagtcgttaaaagcgctgccgtgggaaagcctgctggagaatccgcgtctggtgctgctccaggcctggctgatgcagagccagcatcgctacagcgaagtgaacaccctgctggcgcgcgccgaacaggagatggaaagcgagatggataccaccctgcatggcgaatttaacgccctgcgtgcgcaggtggcgattaacgacggtgaccctgaggaagccgaacggctggcgatggtcgcgctggatgagctgccgctggcgaatttttacagccgtattgtggccacctcggtacacggcgaagtgctgcactgtaagggcgatctcacgcgttcgctttcactcatgcagcaaaccgaacagatggcgcgccgccacgatgtctggcattacgccctctggagcctgatccagcaaagcgagattttatttgctcaggggttcctgcaagccgcctgggaaaaccaggagaaagcgttccagctgatccgtgaacagcatctggaacagctgccgatgcacgagttcctgttgcgtattcgcgctcaactgctgtgggcatggtcgcgtctggatgaagcagaaagctgcgcccgccagggtctgaatgtcctttcgagcttccagccgcagcagcagctccagtgtctggctctgctggtgcagtgctcgctggcgcgcggcgacctggataatgcccgcaaccatcttaaccgcctggaaaacctgctcggcaacgggcagtaccatagcgactgggtgtccaacgccgataaggtccgggtgatttactggcagatgaccggcgataaaaagtccgccgccaactggctgcgtcatacgcctaaaccggaatttgccaataaccacttcctgcaaagccagtggcgcaacatcgctcgcgtgcagatcctgctgggtgactttgagcctgccgagattgtgctggaagagttaaacgaaaacgcccgcagcctgcgcctgatgagcgatttaaaccgcaacctgctgctgttaaaccagctttactggcaggcgggccgcaaaaacgatgcccagcgcgtactgctggaagcgttacagctggcgaaccgcaccgggtttatcagccactttgtgattgagggtgaagtgatggcccagcagctgcgccagctgattcagctcaacacgctgccagaactcgatcagcatcgcgcccagcgcattctgcgcgagattaaccagcaccaccgccacaagtttgcgcacttcgatgagaactttgttgaacgtctgctgaaccatccggaagtgccggagcttatccgcaccagcccgctcacccagcgtgaatggcaggtgctggggctgatctattccggctacagcaacgagcagattgccggtgagctggcggtggcggcgaccaccatcaaaacgcacattcgcaatctgtatcagaagctgggcgtagcgcaccgacaggatgcggtgcagcatgcgcagcagctgttgaagatgatgggatatggagtgtaattcctctgcggtnnnnnnnnnnnnnnnnnnnnnnnnnnnnnnnnnnnnnnnnnnnnnnnnnnnnnnnnnnnnnnnnnnnnnnnnnnnnnnnnnnnnnnnnnnnnnnnnnnnnnnnnnnnnnnnnnnnnnnnnnnnnnnnnnnnnnnnnnnnnnnnnnnnnnnnnnnnnnnnnnnnnnnnnnnnnnnnnnnnnnnnnnnnnnnnnnnnnnnnnnnnnnnnnnnnnnnnnnnnnnnnnnnnnnnnnnnnnnnnnnnnnnnnnnnnnnnnnnnnnnnnnnnnnnnnnnnnnnnnnnnnnnnnnnnnnnnnnnnnnnnnnnnnnnnnnnnnnnnnnnnnnnnnnnnnnnnnnnnnnnnnnnnnagggagagggagaaaattttgtaggtcgggtaagcgcagcgccacccgacacaaccgctagcacaattccagctgcaaattgttatccttaattacctgcatcacgcccgccggtggcatcacatcagtataaaccgcatccaccatgctgatgctgcccatgttgaccatcgcgttacggccaaatttggagtggtccaccaccagcatcacgtgacgtgagttctcaatgatcgcgcgcttggtgcgcacctcgtggtaatcaaactccagcagcgagccgtcgctgtcgatgccgctgatccccagaatgccgaagtcgagacggaactgagagataaaatcgagcgtcgcttcgccaataattccgccgtcgcggctgcgcagttcgccgcccgcgaggatgatgcggaaatcgtctttctgcattaacgtgttggccacgttcaggttgttggtcaccacgcgcaggttctcgtggttcagcagcgcatgggcgaccgcttccggggtggtgccgatatcaataaacagcgtcgcgccgttcgggatctggctcgccactttacgggcgatacgctctttctctgccgtttgcgtcgccttacggtcatgccatgaggtgttcaccgagctggacggcagtgcggcgccgccgtggtgacgcagaatacggttctgatcggccaggtcgttgaggtcacgacggatggtttgcgggctgacggcaaactgctccaccagctcttcagtactgacgtatccctgtttttttaccagttcgataatggcgtcatgacgttgtgtttgtttcatcaaatgtccctgggaattatgttcgttttcgcgcatggagcgtatcggccagcgccatcgccagcccgaccgccaggccggtaacgtgcgcaccattggcgatagacataccaaacagatcaaaccatccggcaataagccatattaacgcaaaggttattaatccacgttgtaaatagatgccactatccgggtcgcgctcgcctctgagccaggcgtaacccatcagggcgtacaccacgccggataacccgccaaaccatggaccgctgaatttgtgctgcacgtagccgcttaacagggcgctgataagggtgatcacaatcagcttgccgctaccgagccgcttctccaccgccccgccgagataccaccaccacagcaggttaaagaggatatgcatcaccgagaagtgcatcagcgcatgcgtgaagtagcgccagacgtcaaattgcagggagggatcgtacggccatgcgagggcaatcatcacgctctggtcgcccaccacgctcataataatgaagacgatgatgcaggctgccatcaaaagcagcgtaaacggtcctgcgcgctcgcgcagggtggcgagaaacggaaaacgttgatagtgcaggccactgccggtctggccggattgccagcttgccgccagataacgcgggtcgcccgggttttccagaaaacgcgccagctcgtcattcacgcggccggcctggctttcgtctgccagccagacatccgtctgtgtatgctgctgaatagtcaggataatgccctgcgtcgccatatagtcgacaaacgcctgggcgacgcgcgggttgctaaaagaggtgatcatcaacatgggcagcggtcgcttatttccacacaaaaggggacagtatagcgggatcagcgctcaaacgcgtattcaacttctgccgggaaatgacgatgccaggcatcgaagccgccatcgacgctgtacaccgcgtcgtaaccctgctggagcagatactgcgccgcgcctttactgctgttgccgtgatagcacatcaccatcaccggggtatcgaagtcgttatcgcgcataaacgcgcccagcgtgtcgttggtgagatggaacgcgcccggcgtgtggcccatcgcaaagctctgcggatcgcggatatccaccagcaccgcttgtccctggtgcatcttctgatgggcttcttctacgttaatacattcaaactgatccatggtgttctcatcttatattcaggtgtggtgcggtttttccnnnnnnnnnnnnnnnnnnnnnnnnnnnnnnnnnnnnnnnnnnnnnnnnnnnnnnnnnnnnnnnnnnnnnnnnnnnnnnnnnnnnnnnnnnnnnnnnnnnnnnnnnnnnnnnnnnnnnnnnnnnnnnnnnnnnnnnnnnnnnnnnnnnnnnnnnnnnnnnnnnnnnnnnnnnnnnnnnnnnnnnnnnnnnnnnnnnnnnnnnnnnnnnnnnnnnnnnnnnnnnnnnnnnnnnnnnnnnnnnnnnnnnnnnnnnnnnnnnnnnnnnnnnnnnnnnnnnnnnnnnnnnnnnnnnnnnnnnnnnnnnnnnnnnnnnnnnnnnnnnnnnnnnnnnnnnnnnnnnnnnnnnnnnnnnnnnnnnnnnnnnnnnnnnnnnnnnnnnnnnnnnnnnnnnnnnnnnnnnnnnnnnnnnnnnnnnnnnnnnnnnnnnnnnnnnnnnnnnnnnnnnnnnnnnnnnnnnnnnnnnnnnnnnnnnnnnnnnnnnnnnnnnnnnnnnnnnnnnnactattttaccccgtagtgtacgtcctggcggcgggtaaacgccattatgttatccatatcactctaaattgtttttttgatgttaccaaaagcgcgttcctttgctattatgagcgatatcgaacatttttgagctttaacgaaagtgcatgagggtgttatggaaaccaaagatctgattgtgataggcggtggcatcaacggtgccggtattgcggttgatgccgcaggacgcggtttatccgtgctgatgctggaagctaacgatctcgcctgcgcgacgtcgtccgccagctccaagctgatccacggtggcctgcgctacctggaacactacgaattccgcctggtcagcgaagcgctggctgaacgcgaagtactgctgaaaatggctccgcatctggcgatcccgatgcgtttccgtctgcctcatcgcccgcatctgcgtccggcgtggatgatccgcattggtctgtttatgtacgatcatctgggtaaacgcaccagcctgccgggttcgacaggtttgcgttttggctcagagtcggttcttaaacctgaaatcgtgcgcggtttcgaatattccgactgctgggtggacgatgcgcgtctggtgctggctaacgcgcagatggtcgagaagaaaggcggcgaggtgaaaacccgtacccgcgcgaccgccgcacgccgcgaaaatggcctgtggattgtggaagcggaagacgtggataccggtgagaagtttagctggaaagcgcgcggcctggtgaacgccaccggcccgtgggtaaaacagttcttcgatgacggtatgcacctgccttctccgtacggcatccgcctgatcaagggcagccacattgtggtgccgcgcgtgcatacccagaaacaggcttatatcctgcaaaatgaagacaagcgcattgtgtttgtgatcccgtggatggacgagttctccatcatcggcaccaccgacgtggagtacaagggcgatccgaaaaacgttgagatcgacgagagtgaagtcagctacctgttgaaagtgtacaacgcgcactttaagaaacagctggcgcgcgatgacgtggtctggacctactccggcgtgcgtccgctgtgtgatgacgagtctgactcaccgcaggccatcacccgtgactatacgcttgatattcatgacgtggacggtcaggcgcccctgctgtcggtatttggcggtaagctcaccacctaccgtaaactggcggagcacgcgctggagaaactggcgccgtattacaaaggcatcggcccggcgtggacgaaaggcgccgtgctgcctggcggcgatatcggcgataaccgcgacgattacgccgcgaagctgcgtcgccgcttcccgttcattaccgaaggaatggcgcgccactatgcccgcacctacggcagcaacaccgaactgttcctcggcgaggcgaaagagattgccgatctgggcgagcattttggccatgagctgtacgaagcggaactgcgctacctggtggaacacgagtgggtgcgccgtctggacgatgctatctggcgtcgtactaaagaagggatgtggctgaatgccgagcagcagtctcgcgtggcgcaatggttgcagcagcatgcgggaaagcgtgaattgtcgttggcgtcgtaattgaaaaaaagccgggtggcggctccgccttacccggcctactcgatcccgtaggcccggtaagcgcagcgccaccgggctttgtttttacaaccgcaccggatcaatatgccagatattctcggcatactctttgatagtcctgtccgacgagaagtatcccatgttggcgatgttatgcatcgcggcgctggtccacttctcctgctgacggtacagttcgtccaccttatcctgacaatccacgtagctgcggtaatccgccagcacctgatagtgatcgccaaagttaatcagcgagtccaccagatcgcgatagcgtccgggctcctcagggttaaacacgccggtggcgatttgcgtcagcacctggcgtaactcgtcatcctcttcataatactcacgcggcgagtagccctgcttgcgcagcgcctccacctcttccgccgtattcccgaaaataaagatattctccgcgcccacatgctccagcatttcgacatttgcgccgtccagcgtgccgatagtcagcgcgccgttcagggcaaacttcatattactggtgccggatgcttccgtccccgccgtggaaatctgctcagagagatccgccgccggaataatcagctgcgccaggcttacgctgtagttcgggataaacacgaccttcagcttatcgccaatgtccggatcgtgattcaccaccttcgccacatcgttgatgagatgaatgatgtgcttcgccatgtagtacgcggacgccgccttaccggcaaagattttcacgcgcggcacccactccgccgtcgggtcagccttaatgcggttgtagtgggtaataacgtgcaggacattcatcagctgacgcttgtactcgtggatacgtttgatttgcacgtcgaacagcgctttcgggttcgccaccacgttcagatgcatcgccagccagaccgccagacgcttcttgttcagcagcttggcttcccgtaccgctttattcaccgtcgggaaatcaatgtgctgctccagctcgctcagctggctcaaatcggtgcgccaggtgcggccaatgttctcatccagaacatcggagagcggctggttcgccagcgccagccagcggcgcggggtgacgccgttggtcacgttgcagaaacgcgtcgggaagatcttcgcaaagtccgcaaacagggactgcaccatcaggttcgagtgcagctctgacacgccgttcaccttgtggctgatcaccaccgccagccaggccatgcgtacgcgacgcccgttggattcatcaatgatcgaggcgcggctcagcagaccggtatcgttcgggtactgctcctgcaaggtcttgaggaagtagtcgttgatctcgaagatgatttgcagatggcgcggcagaattttgccgagcatatccaccggccacgtctccagcgcttcactcatcagcgtatggttggtgtacgagaacacctggcaggttacttcaaacgcgtcatcccagctgaacttatgctcgtcaatcagcaggcgcatcagctcagggatcgacagcaccggatgggtatcgttgaggtgaatggcggttttttccgccagattcgcataggttttgtgcagctgatagtgacggctaaggatatcctgaatcgttgccgagacgaggaaatactcctgacgcaggcgcagctcgcggcctgagtaggtcgagtcatccggatacaggacgcgtgacacattctcggagtggtttttatcttccaccgccgcgaagtagtcaccctggttgaatttacccaggttgatctcgctactggcctgcgcgttccacaggcgcagggtattggtcgcatcggtgtcgtagccggggatgatctggtcataggccacggcgaggatctcctcggtttccacccagcgggattttttcccttcctgctgaatacgcccgccaaaacgcaccttgtagcgcgtgttgtggcgcttgaactcccacgggttaccgtactccagccagtagtctggagactctttctgacgaccatccacgatgttctgcttgaacataccgtagtcgtagcgaataccgtagccgcgccccggcagcgccagcgtcgccagtgaatcgaggaaacaggcggcaagacgcccgagaccaccgttacccagccccgggtcgttctcttcgtcaatcagctcttctaaatccagccccatctcttccagtgcgtttttgacgtcgtcataaatcccgagcgataacagcgcattggagagggtgcgaccaatcagaaactccatcgacaggtaatacacctgtcgcgtctcctgcgaaagctgggcgcggttggagcgcagccagcgttcgaccatacggtcacgcaccgcaaacagcgtggcgttcagccactcatgtttgttggcaataacgggatctttcccaatggtaaacatcagcttataggcgatggagtgtttcaacgcctcaacgctgagcgtgggggaagagtagctaaatggagcattcatatcagtaacttcgcctcgttacatcaagcgttgataaaggtcgcggtaggactgcgccgcaacgtgccagccaaagtccatggacatcgcctgacgttgtacgtaacgccacagggatggacgggaccacaagacgaaagcacgccggatcgcccgaagcagcgaccaggcattactgtcctcgaaaacaaacccgctggcgataccgtccgccaggttttcgagggagctgtcagacaccgtatccgccagcccgcccgtgcggcgtaccagcggcaacgtgccgtatttcagaccatagagctgcgtcaggccgcagggctcgaagcggctcggcaccagaatcacgtccgcgccgcccatgatgcggtgcgagaacgcttcgtgatagccaatctgcacgcccacctgccccggatgttccgccgcggccgcaaggaaaccttcctgcaataccgggtcgcccgcgccgagcagcgccagctggccgccctgctccagtaatcccggcagcgcttccagcaccagatccagccctttctggctggtcaggcggctgaccaccgcaaacagcggcaccttgtcgttgaccttcagccccatcgcaatctgtagctggcgcttgttctccgctttgtcctccacggagtcgcgaccatagcgcgccgccagcaggaggtccgtttccggattccagatctgttcatccacgccgttcagaatgcccgacagacgaccttcacggtggcgctgttgcagcagcccttccataccgtaaccgaactccggctgggtaatttcccgcgcgtaggttgggctgaccgccgtgatgtggtcggcgtagtacagacccgccttcaggaacgaaatctgtccgttaaactccagtccgtgcatgttaaagaacgaccatggcagatcgatgtcattcatatgatgcgcgtaatacatgccctgatacgccaggttgtgcaccgtaaacaccgatttggccgggtgccccttcgccgccagatacgcaggagccagccccgcatgccagtcatgcgcgtgcaccacgttcggacgccagaacggatccagtccgacggccatttccgcccccacccagccgagcagggcaaagcgcatcacgttatcggtataggcgtacaggttggtatcgtgatacgggctgccgggtcgatcgtataaatgcggggcatcaatcaggtaaatccctacgccattgtaatgtccaaacagcagggtgatacgtcccgcgaaggtctcgcgacgggtaacaacctttgcatcgggaataccgcgccggatatccggaaaagcgggcaacaacacgcgggtatccacccctccggcgatttgcgccgctggtaatgcaccaagaacatccgccaggccgcccgtttttaacaacgggaacatctcagaacatacgtgtaaaacctgcatcatcgctcctgtttgatttgcagcttccgcaacatttcccgtgttactaacacgatcccctcttccgaacggtagaaacgacgcgcatcttcttccgcgttttccccaatcaccatcccttcgggaatgatgcaggcacgatcgataacgcagcgacgcagacgacatgagcgtcctacccagacatccggcagcagaactgccgaatcgatattacagaatgagtttatacgcacgcgcgggaacagcacggactgcaccaccaccgaaccggagataatgcaaccgccagagaccagcgagttgagcgtcatgccgtggctgccggagcgatcctgaacgaacttcgccggcggcaacgattccatatgcgtgcgaatcggccagttctggtcgtacatatccagctcaggcgtgacggacgccagatcgaggttggctttccagtacgcttccagcgttcccacatcgcgccagtaaggctccgcattcggatcggactgcacgcaggacagcgggaagggatgtgcatacgccatgccagctttggtgattttcgggatgatgtctttaccgaagtcgtggctggagttttcgtctttgtcgtcctcttccagcagttcataaagataatcggcatcaaagacatagatccccatgctggcgagcgatttggtgtcgtcgcccggcatggttggcgggttcgccggtttttcgacaaagtcgataatcttgtcgtcgccatctacatgcatcacgccaaacgcggttgcttccgcaacaggcaccggcagacacgccacggtgcagcgcgcccctttttcgacgtggtcgatcagcatgtgggagtaatcttgcttgtagatgtggtccccggcgaggataacgatgtattccgcgctgtagcgacgaatgatgtcgaggttctgggtcacggcatccgccgtgccgcggtaccagttctccccgtgaacgcgctgctgcgccgggagcagatcgacaaattcgttcatctcttcgctgaagaatgaccagccgcgctgaatgtgctgcaccagcgtgtgcgactgatactgggtaatgacgccaatacggcgaatgcctgagttcaggcagttggaaagtgcaaaatcgataatacggaacttaccaccaaagtgaacggccggtttggcgcgcttgatggtcaaatctttcagacgggtaccacgcccgcccgcgagtatcagggcaactgtttttaatggtagctggcgcgccaacattaacggatcgttcttctctaatctaaccatgactaactccttttttatcatctttggaatacgcacactccgtgcgcaggcccgtgccagacagccataacaaccggattatccgctccggcaaagggaggaatggctcgccattccccgtcaggtaaaacaatctctgcgacgtcatccgtcgcgttcagcgtcaccagccacgcatccgaaagcaggatttgcagacagggtatgccgtgttgccactcttgcgcgcttaacggttgcgcgtctttattcagccagcgaacgtttccgtcgccctcttcccaccagcggtcggcggtgagcgcggggatgcgctggcgaagatggatcagcgccgcggtgaaatgggtcagcccgctgttcgcttctccccagtcgagccaggtcagggtgttgtcctggcaataggcgttgttgttgccgtgctggctgtggccgtgctcatcgcccgccagcagcatcggcgtgccctgcgacaacaaaagcgtcgtcagcagcgcatgaacgctggcgcgtcgccgctcgatcacatccagacttccgcctaacccttctataccatggttgaagctatggttattgttagtcccatcgcgattctcctcgccgtttgcctcattgtgtttctgattgaaacaaacgcagtcgcgcagcgtaaaaccgtcgtgtgccgtcagcaggttaatggtggccgacggacgtttgccgtcacgcttgaagagatcgctggagccggcaaagcgaccggcaaactcccccagcgacagatcgcgcgtcagccagaagcggcggatggcatcgcggaagtggtcgttccactcggcaaacagcggcgggaaattccccacctgataaccgccctctccgatatcccagggctccgcgatcagcttaacctttgagagcaccgggcagtttttgatggcctcaaacagcggcgcctgctggctgaacgccggggtgcgccccatcaccggcgccaggtcgaagcgaaaaccgtccacgtggaacgtctcaacccagtatttcaggcactcgtacgcgtaatgcataacggccggatgactgaggttgagggtgttaccgcacccggtccagttctcgtaatcgccgtcgtccctgatccaataatagctacggttatcgattccgcgctgtgagagcgtcgggccgtcaagatcgctttccgcactgtggttcagcaccacgtccagaatgacctcgatacccgccgcgtgaagcgccttcaccgcatcgcgaaactcatcccgtgccttctccggctgcaccgcgtagcgcgggtcgagggcgaacatcgccagcgggttgtagccccagtagttgcttaacccaagacgctgtagccgcggctcgctggcgaaatgcgccacgggcaacagctccagcgcggtgatgcctaaatgcttcaggtacgcgaccatcgtcggatgcccaagcgctttgtaggtgccgcgcatctctttagggattgacgggtgcagatatgtcagccctttaacgtgggcttcataaataacggtgttgccccacggcgtgcgcggcggggcatcgtcttcccagtcgtagagatcgtgcaccaccacgcttttgggcgcgacgggcgcgctgtcgcggtggtcaggttcgccgtagccaacgtggaacagcgagtcatctttaaactcaccgtccacgcggtgcgcgcacgggtcaatcagcagcttcgccgggttaaaccagtgcccctgagagggctcccaggggccgtgtacgcgaaaaccgtagtgcatccccggccgtcctccggccaggtagccatgccaggtatcccccgtgcgcgccggtaaatcgtaacggtgctcgttaccttccccgtcaaacacacagagttccacccgctccgcatgggcggaaaagagcgtgaagttcaccccctttccgtcaaagctcgccccgagcggttcgggtttacctgccgtaagctgcgtcattcaccctcccgcaccagccagattgtgccaagcggcggcagcgtcaggctcagggagttcggacggccgtggctttcaatggcatcgctctgcaccaggccaccgttacccgcgttgctgccgtggtagtgcatggagtcggtattgagaatttcgcgccatttgcccggctggttaatgccgaagcggtagtgttcgcgcggcaccggcgtgaagttgctggcgacgatgatctcgttacccgctttgtcgcggcgcacaaagacaaacaccgagcgctcgtggtcgtccaccaccagccactcaaagccgtacggatcgaagtccagctcgtgcagcgctttgtggtggcgataggtcaggttcaggtcacggaccagacgctgtacgccgtggtgccagttgtccgcaccttccagcagatgccagtcaaggctgctatcgtggttccattcgcggccctgagcgaactcgttgcccataaacagcagctttttacccgggaaggcgaacagccagccgtagtaagcgcgcaggttggcaaacttctgccatgggtcgcccggcatgcggtcgagaatggatttcttgccgtgcacgacttcatcgtgcgacagcggcagcatgaagttttcggtgtagttatagagcaacccgaaggtgagcttatcgtggtgatactgacgataaaccgggtcgagcttcatgtagtcgagcgtgtcgtgcatccagccgaggttccatttgtaccagaagcccagaccacccattgccggtggacgggaaacgcccgggaagtcggtggactcttccgccatggtcacggcgccttccacctgctcgccgataatccggttggtgttgcgcagaaactcaatcgcttcgaggttttcacggccaccatactcgttcgggatccactccccctctttgcggctgtagtcgcggtaaatcatcgacgccaccgcatccacgcgcagggcatcaatgccgaagcgctcgatccagtacaacgcgttcccgaccaggtagttcgatacttcacggcgaccgtagttgtagatcagcgtgttccagtcctggtgatagccttcgcgcgggtcgctgtgctcgtacagctttgtgccgtcgaactctgccagcgcaaaatcatccgacgggaagtggcccggcacccagtcgaggatcacgttcagcccggcggcgtgcgcggcatcgatgaaatagcggaagtcatcgcgcgtgccgaagcggcgcgtgggcgcatacagcccggttggctgatagccccagctgccgtcaaatgggtgttcgttgatcggcagcagctccagatgggtaaagcccatccatttggcgtacggcaccagctggtccgccagctcgcgatagctcagccagaagttgttatcggtgtggcgacgccacgagccgagatgcacttcatagacggagattggcgcatcaaagcggttggcctgcttgcgctcctcactctggacaaccttctccggcaggccgcaaatcagcgaggcggtattggggcgtagctctgcctcaaaggcgtacgggtcagatttaatgcgcagcttgccgttggcatcgatcatctcgaatttgtagagctgaccgttgtgcgcgccggggataaacagctcccagatgccggtttcccggcgcaggcgcatggggtgacaacgaccgtcccagtagttgaactgcccgacgacggagacgcgctgggcgtttggcgcccatacggcaaaacgcgtgccggtgataccgtccatggtatctgcatgggcacccagcgtttcgtaggggcgtaaatgggtcccttcggacagcagccaggcgtccatctcttttaagagcgggccgaagctatagggatcgtcaatcaggttttgctgaccgtgccagataacggcaagctgataacgaaaaggatttttacggcggggcatgacgcccgagaagaagccacgcgagtcgaggcattccagattacccaccttgcggccggttttgggttcgataacccacacttctgttgcatccggtaacagcgcccgaacttccagtccggcctctgtacggtgcatccctagcacagaaaaggggtcggcaaagtgacccgcaataagcgcattaatcacgtctctcgaaatacgatcggacatggtgttcatcctgtttttttatgtcgccctttttacgcgctccgggacgacttttaatgtgacctaaacggtgcagttaatcctctctgctccgccctaccctcaggtgagaaataaatcttccttaaagcatagccaacgtcgtgggtcctcctgataaaaaataagacatctgcgttttactccatgtagtacgcaaaaaaagggggtgacaatcaccccccgtgtttaacaaattattacgccagctggcgcagcatacggcgcagcggctcggctgcaccccacagcagctgatcgccaacggtgaacgcggagaggtactccggccccatgttcagcttgcgcagacgaccaaccggggtggtcagcgtgccggtaacggctgccggggtcagttcgcgcatggtgatatcgcgatcgtttggcaccactttcgcccacgggttgtgtgcggccagcagctcttccacggtcggaatagacacatcttttttcagtttaatggtaaaggcctggctgtggcagcgcagcgcgccgatacgcacgcacagaccgtcaaccggaatggtgttcgcggtgccgaggattttgttggtctcagcctggcccttccactcttcgcgggtctggccgttatccagctgtttgtcgatccacgggatcaggccaccggccagcggtacgccaaagttatccaccggcagctcgccgctgcgggtgagctgagtgactttacgctcgatgtcgaggatggcggacgccgggtctgccagctcggcagcgacgctctggtgcagctggcccatctgggtcagcagctcacgcatatgacgcgcgccgccgccggaggccgcctggtaggtcgccacggagacccactccaccagatcctgtgcgaacaggccgccgagggacatcagcatcaggctgacggtgcagttaccgccaacaaaggttttcacgccgttgttcaggccgtcggtgatgacgccctggttaaccgggtcaagaataatgatggcatcgtctttcatgcgaagcgaagaggccgcatcaatccagtagccctgccagccgctttcacgcagcttcggatagatttcgttggtataatcgccgccctggcaggtcacaataatgtcgagtgccttcagcgcttccagatcgtaagcatcctgcaacgtgcctgtggtacccccaaaggacggtgcagcctggccgagctgggaagtggagaagaagaccgggcggatggcgtcgaaatcgcgctcttcaaccatgcgttgcatgagtacagagccgaccataccgcgccagccgataaaaccaacgtttttcatagcatttttttcctgcaaggggtgtgtgctgattgtgcaagccagtattgaactgggatatgcttcacattacaaaatgctgccaaagtcgcaagcgaaattaatcgatgattgcccggcaatcagaaaaagtgctaatcatcgcaatgaccacaataagtatcagggataatttaagatgagtgaaatcatttccgcagcggttttattgatcctgattatggatccgctcggtaatctgccgatcttcatgtcggtgctgaagcataccgagccgaagcgccgccgggcgatcatgatccgcgagctgctcatcgccctgctggtgatgtttatcttcctgttcgccggtgaaaaaatcctcgctttcctgaacttacgcgccgaaacggtctccatttccggcgggatcattttgttcctgattgctattaagatgattttcccgagcgcggagggcagcagcagcggcctgcctgcgggtgaagagccgtttatcgtgccgctggcaattccgctggtcgccgggccaacgattctggcgacgctgatgctgctgtcgcatcagtatccgaatcagatgagccatctggtgattgccctgctgatcgcctggggcgggacgttttattatcctgtttgcagtcgtcgctgttcctgcgcctgctgggtgagaaaggggtaaacgccctggagcgcctgatggggctgattctggtgatgatggcgacgcagatnnnnnnnnnnnnnnnnnnnnnnnnnnnnnnnnnnnnnnnnnnnnnnnnnnnnnnnnnnnnnnnnnnnnnnnnnnnnnnnnnnnnnnnnnnnnnnnnnnnnnnnnnnnnnnnnnnnnnnnnnnnnnnnnnnnnnnnnnnnnnnnnnnnnnnnnnnnnnnnnnnnnnnnnnnnnnnnnnnnnnnnnnnnnnnnnnnnnnnnnnnnnnnnnnnnnnnnnnnnnnnnnnnnnnnnnnnnnnnnnnnnnnnnnnnnnnnnnnnnnnnnnnnnnnnnnnnnnnnnnnnnnnnnnnnnnnnnnnnnnnnnnnnnggcgtggatgaaagggtaggtaaaagcaaaacggtaatcttagattgccgtttttagtgtttgccccctctccccgtgggagagggccggggtgagggcatcaggccgcaccctaaaataatatttcgttttgcgagccgccttccagagcctctcttgccactccgcccccaacgcagtatcttcttgccgcgcctgcaaaatcaggcgtcagggttggtcccctgttatcctcatccgcgatgaatctctttttatcgcgcagtcagttacacttcaatggtgggctggacggtggcgccgcaaggcgcgccggtagctgatgaggccggtaggaccaactccgttcagtccatcaccagtgaggttggtccctccaaagatggtcaactcaactcatcagaggctgtcttatgactactacccctaacttttctcacactttatttactaccccgttcgatcacactaccgatttcaccgaactggcagacaactgcgagcaattcgtagacgtgctggttgaatgtgacgatccagcacaaaagatggcgatatgcggacggctttccgcctgcctcgccctgctccagcccacgctgcttgaacctgttccggaatgtctaaaagccagcctgacggtggatgacctgccgctggacgtgccggtttttgaaccggagatcgatcaactggggagatactgccagctgctaacgcaaatgctgttggctcgaacgctctcggcgagcgatgaaagagtcgcaggagatttgttgcaggatttagtggggttttacagtgatacgctgaaagcgccgcgctggttgcgcacaaaggaaggcatcgtgccgctgtaaaaaagccgggtggcgcttacgcttacccggcctacgggacctgaggtttttgtaggtcgggtaaggcgaagccgccacccgacaaaatacgccctctgcggcctgatgccctcaccccagccctctcccacggggagagggagaaaaccgggattagctcagcagcgtaaacgcaatcatcccgacaaccgcacccgtcgtgccgaggatggtttccatcagcgtccaggttttcagggtttgcgcttcggttgcgccggtaaatttaccgaacagccagaagcccgcgtcgttaacgtgagaaaccacaatcgagccacccgcgatacagatagagagcgccgccatctgcgcaccggagtagttcagctgttcaatcaccggcattaccagacccacggcggttaagcacgctacggtcgcggagccctgaatgatacgtaccgccgcggccagcacgaaacaggtgactgcaatcggcagccccatcccggtcagcgcttcacccagcgccgggccaacgccggaatccaccagcacctgcttgaacacgccgcccgccccgatcaccagcaggataatccccgccggttgcagcgcggcaccacagatctccatcacgcggtctttcggcataccctgacgcatcgccaggccgtaaattgctaccagacacgccaccaggatcgcggtgaacggatgaccaataaattcgaaccattcgtaagcggttgaccccaccggcacaaagcgcgcagcgatggttttcaggcccaccagcaccagcggcagcaggatcagcgacaggctgaagccgaaagacggcattttgccctcgcccaggtgcggctcggagatgtcatccggaatgtgcagctcaacgtaacggctgatgaagttgccccacagcggaccggcgataatcatccccggaattgccgcgcacaggccaatcaggatcatccagccaaagtcagcatgcatctgggaggccagcagcatcggcgcaggccccggcagcaggaacgccgccgccgccgccacgcccgcaaacagcggaatgaccagcttcacgaggttggtaccagtatgccgcgccatggagaacgccacgctaatcagcagcacaacggccacttcaaagaacagcggcagcgcgcaaatcagaccggccagaccaatcgcgtagtgcgcacggctgtgcccgaaggatttcagcatcttgaccgcaatctgatcgaccgcgcccgtctcgtgcaaaatcttgccaaacatcgcgcccagcgccaccacaatggccaggaagccgagcgtgccgcccatccctttttccatcgtcgccgcgattttgtcgagcggcatgccggaaaagagaccggcaccaatagaaaccaccatcaaagccacaaaggcgtgcatacgcgccttcatcactaaaaacagcagcagcaatacggaacccactgctgtcaaaactagcgttaatgtactcaaaacttactgccttttattaataacctcgatggtgctggcaacaacaccttccagcggctgatcgatatcaaccactaagacatcctgttcgtcagctcccggctcctgcaacgcttcgaactgcgttaccagcatctgggttttgaagaagtggcctttacgcgccttcaggcggctttcaatcaccccgaaatcaccctttagatagatgaaggagaggttcgggttgccgtcgcgcagcaggtcgcgataggtttttttcagtgcggaacagacgatcagggagactttattggtgcgctgcatcgcgaacgcggcgtcattcagcgcctgcaaccatggtttgcggtcgtcgtcgttcagcggctcgccggaagccattttcatgatgttgctgcgcggatggaggaagtcaccatcaagaaacgcagcctggagttgatgcgccacttcgctcgccacggcagatttaccgctaccggacacgcccatcaggacgtaaacgtggtgatcgtgattagtcgtgctcaaagggtgtccctcagtcaattgttacgggtaacagttatcggtaacattgtcctgccggggcataagagaagcaatatccaaacgtgcgcgaagtgaataagtgtgagctacttcaaatttgtcggattaaatagatccacccggtgacaaggtgaaacctaaatctaacattttcggggtaactgcctcaccacgaatgcgcgccagcaggcgctctgcgccaatgcggcccatgcgttcacgcggggtcaggacgctcgccagacgcggctccatcacctggccaatgtcgtggccgtggaagccggcaatcgccatatcatccgggatttttaaacccagacgctggcactcaaacgcggcgccgaccgcaaggtcatcgttggtgcagaaaataccgtccagttgcggatactcgcgtcgcgcctgacgcatcagctcaatacccgacgtgtaagaagaagattgctccaccatcacgctgtacggggtcaaaccggcgtcgagcatcgcctgctcgtatcccttctgtttgatgatagtacgttcatccagacgcgcacccagataggccacatggcgatgaccgcgggcgatgatcgccgccgtcatctgacgcgccgcttcaaagttatcgaaccccacggcgatgtcgaggcacggcgactggctgtccatcagttcaaccaccggaatgcctgccacttcaatcattttcagcgtgcgcggggtgtgagtacgttccgttaaaatcaggccgtcaatgttccaggaaagcatcgattcaagacgttcctcttccagttccggcttgtacccgtagtgggcgagcatggtctgatagccaaatgcatcggtgacgctttcaatgccacgcagcacttcggcgaatacctggttggttaaggaaggaagcaggacgcccaccgcacggctggtcgcattggagagaatatcgggcgcgcggttggggatataacccagttcatcaagggcggcggcaatcttgccacgcaacgccacggaaacctgttccgggttacgtaaaaaacggctgaccgtcattttggtcacaccgacgcgatcggcgacatcctgaagtacggggcgtttctttttcatcgtcctgagaaatcttgaagtgagagatttgctcagtttatcacggacaaagctcaaccttccccgtttaaagggaaggttgagaaattatttagaccggcggcaggtcaaacagcagaatttcactttcgctgtcggcatgcacggagagcgcctgctcatcccagactgccaggccatcggcggttgtcgctttggtgccgttgatggacacttcacctttcaccacctggatccacacgcggcggttagcggcaatctggtgtacagactgttcatctttcgccagcgcccagcggtacagctccatatcctgatgcactttcagggaaccttcacgcgcatccggggacagcaccagctgtttgccctgtttcgcgtcgaagcggcgctgctcgtagcgtggcgtgatgccggtctcttctggaatgatccagatttgatacaggtgcagtttttccgttttgctcgggttgtactcagagtgacgcaccccggtacccgcgctcataatctggaactcgcccgccggaacctgctctttgttgcccatgctgtcctggtgctcaaccgccccttccagcacataggtcaggatttccatgtctttgtgcgggtgggtaccgaagccctggcctgcatcaatcacgtcgtcgttaatcacgcgcagtgcggagaagcccataaagttcgggtcgtagtagtcggcaaacgagaatgaatgccatgagtccagccagccatgattcgcgtgaccacgttcgtttgctttgcgtaagtagatcattgttttcaccctcagttcgtttcgatggagtaagtgtggacgcaaaggccctgggatcatagagggtgaaaattgactcctctgttcaaaaatttagaacaagcgcagaggagccgtttttgcttatctggcgagggttaccgtggcaggcgaggcctgctcgaaggcccgttcaaggatttccagattggtcagaacgtcagattccttgacataattcggcgcgccggtggtgagggtgtcatacagcgcatcgtagacgcgtccatagtcgcccgtttccggcttcagctcttccctgaccaccaggccctcgtcgttcacgtactccagcacgcccacggaatcatctgccgcaaagcccggttcacccggcatgatattggccttcaggctggtctcctgttggtcaataccgtacttgataaaggagcctttcttgccgtgaacgataaatttcgggtagtcgattttcaccagatggctggtttttacgatggctttgagatcgccgtagaacagctgcgcttcaaaggtatcgtccgggttggccttattgcgcaggctgcggatgtcatacgccacgtggtccgggcggccaaacagggagatgagctggtccatggtgtgcacgcccagaccatagaaggagccatcctgcggcaggccgggctgggtttccgccaccggtcggtagtaatcgaagtggctttcgatttccacgatctcgccgagtttgccgctttcaattgccttttttgccgtcaggaagcagctgtcaaagcgacggttctggtacggcgtgacggtcagccctttgcttttcgccagcgcgaacagctccttcgcttcggcgatggtcggggtgaacggtttttccaccagcacgtttttacccgcttccagcgcgcgtttcgcgtagtcaaagtggctgtcggcgtgggtacagaccaccaccagcttcacctgcgggtcgttaagcacctcatcaagatcgctggtgaaatgaatatgggaatactgcggagactgctcttctggcttcgcgcggcggcgatagatatgggccacgtgccaggtctcttttcggttaagaacatacggaaggtggtaacgcgtggtgcttttgccaaatccaataaatgcacaatgtagtgtcatggctcagtccttttggaaggttactgagttttaccatagcgcatgttttgccctcaccccagccctctcccacagggagagggagaaaaannnnnnnnnnnnnnnnnnnnnnnnnnnnnnnnnnnnnnnnnnnnnnnnnnnnnnnnnnnnnnnnnnnnnnnnnnnnnnnnnnnnnnnnnnnnnnnnnnnnnnnnnnnnnnnnnnnnnnnnnnnnnnnnnnnnnnnnnnnnnnnnnnnnnnnnnnnnnnnnnnnnnnnnnnnnnnnnnnnnnnnnnnnnnnnnnnnnnnnnnnnnnnnnnnnnnnnnnnnnnnnnnnnnnnnnnnnnnnnnnnnnnnnnnnnnnnnnnnnnnnnnnnnnnnnnnnnnnnnnnnnnnnnnnnnnnnnnnnnnnnnnnnnnnnnnnnnnnnnnnnnnnnnnnnnnnnnnnnnnnnnnnnnnnnnnnnnnnnnnnnnnnnnnnnnnnnnnnnnnnnnnnnnnnnnnnnnnnnnnnnnnnnnnnnnnnnnnnnnnnnnnnnnnnnnnnnnnnnnnnnnnnnnnnnnnnnnnnnnnnnnnnnnnnnnnnnnnnnnnnnnnnnnnnnnnnnnnnnnnnnnnnnnnnnnnnnnnnnnnnnnnnnngaagctggctaaagtaatactggaagcaatgtgagcaatgtcgtgctttcaggttcccgtaggaggtcttcctgaatgcagagcaataataatcattctcattcgcacttgtccaacactttttgcaaaaaatagcgattgactcaacttttaaagtcactgatgttggaggggacttttaactgactgaggaacaaggaatgagtgagatagtgatacgccacgctgaaccgaaagattacgacgccattcgtcagatccacgcccagccggaggtgtaccacaacacgctacaggttcctcatccttcaatggaaatgtggcaaatgcggctaggcgaacagccgggcattaaacagctggttgcctgcattgatgatatcgtggtcggccacctcaccattgatgtcgcccagcgaccacgccgcagccacgttgcagatttcggtatctgcgttggcgcgcagtggcataaccgcggcgtggccagcgcactgattcgcaccatgatcgatatgtgcgacaactggctgcgcgtcgaccgcatcgagttaacggtgtttgtggataacgaaccggcaatcgcggtgtacaaaaagcacgggtttgagattgaaggcaccggcaggcgctacgccctgcgcaacggcgagtatgtggatgcgtattatatggcgcgtatgaagtagtttgttgccgggtggcggcttcgccttacccggcctacgttcgtgccgttgcaggcccggtaagcgcagcgccaccgggcaaaaaaatcaataccccgccgttaaatcatccaccgaacgcgggtccgatgcgccaaacagcgccccgtccggcccgaccataatgctctgggtgctgcccatcgcctccttcaccgccaccttctgcccgcgctgctcaagaagcttgagggtgtccgggctaaagcccttctccacgcgcagctcgtccggcagccactggtggtggaaacgcggcgcattggtcgcttcagcgacgttcatcccaaagtcgatactgttcaccaccatttgcagcacggttgtgataatccggctcccgccagggctgccggtcaccagccaggttttgccgtctttcaccacgatggtgggcgacatggacgacagcgggcgcttcttcggcccgaccgcattcgcatcgccgccgaccagcccgtagacgttcggcacgcccggtttggcggagaagtcatccatctcgttgttcagcaaaatgccgctgttgcccgccacaatcccggtgccgaaggtggtgttaagcgtgtacgtcaccgccaccgcgttaccgtctttatccaccaccgagaagtgggtggtctggttactttcatacggcgccagcttgcccgggcggatctcgctcgacggcttcgccttgttgatgtcgatctcgtcggcaattgatttggcataggctttgttggtcagcgcctgccacggcaccttcacgaagtccggatcgccaaggtattccgagcggtcagcgtaggcgcgcttctccgcctccgccatcacctgcatggcatcggcactaccgaagccgaacttgtgcatatcgaagttttccagaatattgaggatctgcacgatgtgaatgcccccggaggacggcggcggcatggagaagacctcgtagccgcgataggtgccgctgatcggctcgcgctccaccgccttatattccgccagatccgctttggtgatcagcccgccgttcttctgcatctcatcggcaatctgatcggcaatcggccccttatagaaggcgtccggaccgttttcggcaatcagttcgagactttttgcgaggtccttctgcaccagcttatcgccctttttcagcggctcgccgtctttccagaagatagccttgctgttctcatgattgggaataacttcgctgccgtaggttttgaggtcgtccgccagcgcgtcgttgacgacgaagccgtcgcgcgccagcttgatggctggctgcaccactttattcagcggcagcgtgccgtatttttccagcgccagcgagaagcccgcaacggtgcccggcgtgccggaggcaaggtgcgaggtcagagactttttactgtccggattgccctgatcgtcgaggaacatatcgcgggaagcctggttcggcgccatctcacggaagtcgatggccgtggttttaccgtctttggtgcgcagcatcataaacccgccgccgcccaggttccccgcctgtggatgcgtcaccgccagcgcatatcccaccgcgaccgccgcatccaccgcgttaccgccctgtttaagaatatcgacgcccacctgcgttgccagcgcgtcaaccgaggccaccatgccgtgcgtcgcccgtacggggtgaaaaacatcctcctccacgccgtaagagaccggaggagcggcgggcgggttggccgccacggtaaatgtgccgcctgccatcagcgcagcgatggcgacccagcgcaaaaaggttggtttcatcattattgttctccaggtgaaggggcccatattccccgcttaagcctggttcacaactcttaaaaaatcatcgttatgccggaatcagggtaaacttaagagaagcctcaaaggaggagataaccatgaaacgattactgatcctgaccgcgctgcttccgttcgccgcgctcgcacagccaatcaacaccctgaacaacccgaaccagccgggctacgtcattccgagccagcagcgtatgcagacggagatgatgagccagcaacagcagcagaaagggatgctcaatcagcagttaaaaacgcagacccaggtgcagcagcagcacctgcaaaaccagatgaataccaacacccagcgcgtgcagcagggccagatgcttgaacagccgctgccaaactcaaacggtgggatgttagggggcggggtgtcgcaaagcagcggtcagcagcacatgctgccgacccagcagaacggcagtatgcttaataaataaagttcggcccaatctggtcaatcgcatcggtacagatgctgtccacgccccagcgcagcagctcggctgcacgctggggtttattgacggtatacaccaggatatgcagaccggcctccttcaacagcgtcacgcgcgcttcatccagcagcttatggttgaggtggatcgacacgcagcctaagaaggtcgtcagcgcgcgccagtcttctcgccactcatccagcagcagcccgcgcggcaactccggtacggcagcctgtgcggcttccagcgcgtcgatgtcaaacgacgacaacagcggcggggtcatcccttcccacagctcgcgcgcggcgagggcaatcactttacccgtcagcggcccggtgccggtggtcggtttgatttcgatgttggccatcatgccgttttgacgacagcggtccgccacttccgccagcagcggcagcggttcgcctttaaattcgccgctgtaccagctgccggcgtccaccttcagcaggtcacgccacggcagttcacctgccacgccccagccgttgctggtgcgttcgaggttgtcgtcgtgcagcaggaaaatttcgccgtccttcgacagcttggcgtcgaactcgatcatcgtgtggccgtagcgcgcgccaacgtcaattgccgccagggtgttttccggcgccagtttaccgccgccacggtgggcgacgatgtgggggtaaggccagttgctcatactcgttgtcctgtttcaccgtcaaataagtgcaggtgattttccggcatatgcagccacagcgtgctgcctgccttcgggcgctcctgatgcggcaggcgcaccaccagcttttgctcgccccagcgcccgtgcgccaggttgtctgcgcccagcatctccagcgtatccatcaccagcggcacgccgccgtccgcctgagacgtcaaaccaatatgctccgggcggataccgagcgtcatcttacgcccggcgtagccacgatagtaccagttgatcggcaacgccatcccgctttccagctcgaagtgggttcccgccgtattgatccgcccgtccagcaggttcatcgccgggctgccgataaagctcgccacaaaacggctggccggtttttcgtagacctccaccggggtgccaatctgctcggcgatgcctttgttcatcaccatcacgcgctgggcgagggtcatggcttcaacctgatcgtgagtcacatagagggacgtggttttcaggcggcgatgcagctgctgtagctcaaggcgcatctgcacgcgcagtttggcgtcgaggtttgacagcggttcgtcgaacaggaataccgccgggtcgcgcacgatggcgcgccccatcgccacgcgctgacgctggccgccggagagctcgcgcgggcggcgcttaagcaggccgtcaagttccagaatgcgcgcggcttcttttacgcgctcgtcgatatgacctttgcccataccgcgaattttcagcccccaggccatgttctcttccacgctcatgtgcggatagagggcatagttctggaacaccatcgcgatgccgcgatctttgggctccatctcggtgacgcgctggcggtcaatccagatatccccggacgttacgcgctccagcccggccaccatacgcagcagggtggattttccgcagccggacgggccgaccatcacgataaattccccgtccgccacgtcgagcgtcagcggctgaatgacctgggttttaccgtcccagcttttggtaactgcctgtaattttaaacctgccatcttatttctcgctatcgaccaggccgcggacaaacgcgcgctgcatggctaaaacaatgactacgggtgggataagggtgagcagcatcgccgccatcacctggttccagagggtggtgccttcgccggtggcgatcatgcctttaatgcctgccacggcagtgccgaggttgacgtcctgaacgatcagcaacggccacaggtactggttccagccgtagataaaggtgatcacaaacagcgccgcgaggttggttttcgacagcggcagcacaatgtcgcggaagaagcgcatcggcgaggccccgtcgatgcgcgcggcttcaatcaactcatccggcagggtcataaagaactggcggaacaggaaggtggcggtcgccgaggccatcagcggcagggttaagcccgcgtagctgtcgagcatcttcaggttggcgatcacctccaccgtcgggaagatacgcacctctaccggcagcatcagggtgatgaaaatcatccagaaaaacaggttacgcagcggaaagcggaaccagacgatggcaaacgctgagagcatcgacaccgtaattttgccgacggtgatgccaaacgccatgatgaagctgttgagcatcatcagccagaacggcgcgctgttggcgcccacgccctgggtccagatggtcttcatgttctcgaaaagatgcccgcctgggatcagcgtcatcggcgtgtcgaacaccgctttggtgtccagcgtggcggcgacgaaggccacgtacagtgggaacaggatgacgataatccctaaaatcagcatggtatggctgaaaatcgtcagcccgcgacggttctcaatcattggtagcgcaccttactttcgacatagcggaactgcaccaccgtgaggatgatgacgaggaacatcagcaccaccgactgcgcggcagaagcggagagatccaaccccgcaaagccttcgcggtagatcttgtagatcagcgtcgttgtcgcctgcaccggaccgcctgcggtcgccgcgtcgatcaccgggaaggtatcgaagaaggcgtacacgaggttaaccaccagcaggaagaaactcaccggggcgatcagcggcagcgacaggcggaagaagcggcgcaccggccctgcgccgtcgatggcggcggcctccaccagcgaacgcgggatagactgtagcgcggcaaagaaaaacaggaagttatagctgatctgcttccacaccgaggcgaacaccaccaggaacatcgcctgaccgctattctgagcgtggttccagtcgtagccaaactcgcccaggaagtgggtaatcagcccgcgccctgggttaaacaggaagatccacagcacggcggccacggcaggagccacggcgtagggcagcagcatcagggtctgatacagacggctgccgcgcaccacgtaatccaccagcgcggcgaaaaacagcgacgcgacaagaccgctcacggtgaccagcgcactgaatttgatcgtcgtccagaaggagtccaggtagtagctgtcgtggaacagcgcggtaaagttgtccagcccgacaaactggctggaaagcccgaacggatcgacgctttgtaccgagtaccacagcgcttcgcccgcaggccagataaagaagataacggtgatgaccagctgcggtgcgaccaacaggtacggcagccagcgggaacggaacaccggacgggatgaggacattgagattaggttcctgaacaatgccgggtggcggctacgccttacccggcctacaaatatttctccctctccccgtgggagagggttggggtgagggcatcagcccgcacgatccccgtaggcctggatcgctacgcgtcaccgggcgaatcacggattacgatttcgtcgactgctcaaagcggcgcagcagctgatttccgcgctctaccgcagcgtccagcgcctgctgtggcgttttcttaccggtccacacgctttccagctcttcatccacgatggtgcggatctgcggcatgttgcccagacgcagacccttggtgaacggcaacggcggcttgttcagcatctggcgcgtcgcgatgtccgcccctgggtttttgctatagaagccctgctcgcgggtcaggtcgtacgcggctttggtgatcggcagatagccggtcttctggtgccactcggcggcgttttccggcttcgccaggaagtcgaggaactcggccacgcctttgtaggtgccgttgtctttaccctgcatcacccacaggctcgccccgccgatgatggcgttttgcggcgcgcctttaacgtcagcgtcgtacggcatcatgcccacgccgtagttgaatttggcatagtgacgtatatccgccagcgagccggacgaggcggtggtaatggcacagtcgccgttgtagaacttctcggtggattcgtctttacgcccgaagtagctgaagtcgcccttcttgttgagtgcttccagcagcgcgatgtgcttcacctgctccggcttgttgaactccagcaccgcgtcggtaccgtcgaagccgttattttgggtggcaaccggcagcccgtgccaggcgctgaagttttcaatctggatccagccctgccagccgctggcgtagccgcacttcatccccgccgctttcagcttcgcggtgtactccgccagatcctgccaggtttttggcggctgctccggatctaaaccggcttttttgaaggcgtctttgttgtagtacagcaccggcgtggagctgttaaacggctgggacagcaggtggccggttctggaatcggtgtaataaccggagacggtcggtacgaactgggattcatcgaagttaatacctgcttctttgaacacttcatacaccggcttgatggctttggaggccatcatggtggcggtgcccacttcataaacctgtaacagcgcaggcgcgttaccggtacggaaggcggcgatgcccgcgctcaggctctgctcgtagttgcctttgtacaccggcacaattttgtaatccgggtgggtgtcgttgaaacgctgcgccagggagtcaacctctttacccaactccccttccatggaatgccagaacggaatggtggtcacagccattgcgttcgtcgcaaaagccagacccagtgccagacccaaagctgtgtgtcgtaacgatgtcattgtcatctctcttattgtgccggatgcgcgatatcacgcgttttatgctcgcgaggtaacatgacatgctcgaatgacagaaaaataactgtttgtttacagataagtgacagccaggcgtcagggggatgatggttgtgtgaaggggtgtagtggttaaaaaagccgggtggcggctacgccttacccggcctggtcgatccctgtaggcccggtaagcgcagcgccaccgggcaacacagacggcttagcctccgaggtacgcactccgcaccgcctcgttcgccagcagcgcgtcaccggtatcggagagcaccacgcgcccgttctccagcacgtagccacggtcggcgagcttcagcgcctggttggcgttctgctcgacgaggaagatggtcatcccctctttacgcaactgctcgatggtgtcgaagatctgctggataatgatcggcgcaagaccaagcgacggctcgtccagcagcagcaggcgcggctggctcatcagcgcgcggccaatcgccagcatctgctgctcgccgccggacatggtgcccgctcgctgaatacgacgctcccacaggcgcgggaagagttcgtacacccacttgatgcgggtctggaattcatcccgatgggcgaagaaaccgcccatcgccaggttctcttccactgtcatgcgggagaatacgcggcgcccttccgggacaatcgccaccgcttcacgcatgatcttagccgtctgccagtcggtaatatctttgccgtcaaacacaatccgcccgctggtggcgcgcgggtcgccgcacagggtgccgagcagcgtggttttacccgcgccgttggcgccaatcagggtgacgatttcgccctgattgatgtgcaggctgacgtcgtgcagcgcctggatcttgccgtagtgcgcgttgaccttgtcgaacgttaacatcgctttttccatcttatgcctcaccaaggtatgcgcggatcacgtccgggttgttgcggatctcttccggcgtgccgtttgccagcggcgtgccctggtttaccacgtagatacggtccgaaatgcccatcaccagcttcatgtcatgctcaatcagcaggatggtggtgtcgtgatggtcgcgcagctcggcaatcagctcgtccagctctttggtctctttcggattgagacctgccgctggttcgtcgagcatcaggatctccggctgggtcaccatgcagcgcacgatctcaaggcgacgctgatccccgtaagcgaggttgctcgcctgacggttagcgtgctggagcaggccgatacggtcgagccaggtcgcggcgcggtcgagcgcctcctcctgcgtgcggcgaaaggccggggttttcagcaggccggagaagaggccggttttcagctgctgatgctgtgccaccagcaggttctcaatcaccgtcatctcgcggaacagacgcacgtgctggaaggtacgcaccacgcccatgcgggcaatctgctggcccggcagcccttcaaggtgctggtcgcgcagcatgatggtgccgcccgtcggcttgtagaagccggtcaaacagttaaagaccgtggtttttcccgcgccgttcgggccaatcagggagacaatctctttcttgtgcagatccagattcacattgttgaccgccagcaggccgccaaagcgcatcatcaggccgttaacggataataaaggcttcatgcctgctctcctttcgcctgtgtgcgtttcagcttcagctgtggacgggtcatcggcagcagaccctgcggacgccagatcatcatcagcaccatcaaaccacccagcattaacatgctgtattcgttaaagtcgcgcatcagctcgcgggagaccaccagcaggatagccgcgaggatcacggcgaactgcgagcccattccgccgagcaccacaatcgccagcacaaaggcggattcggcaaaggtgaacgattccgggctgacgaagccctgacgtgcggcaaacagcgtcccggcgaaaccggcaaacgcggcgctgatggtaaatgcggtcagcttgatgcgggtcgggttcaggcccagggagcggcaggcgatctcatcttcgcgcagcgcttcccacgcgcggcccagcggcatgcgcagcagacggttgatcacaaacagggtaatcaccaccagcagcagcgccaccagatagagccagatcacgcggtcggacggatcgtacttgatgccaaagaaattgctgaaggtatcccagccgccttcacgggcggtacggctgaactccaggccgaagaaggtcggtttcgggatctggctgatgccgttcggaccgccggtcacttcggtattgttgagcagcagaatacggacgatttcgccgaagcctaaggtcacaatcgccagatagtcaccgcgcaggcgcagcaccgggaagccgagcaggaagcccgccgcggcagagaccagccccgccagcggcagacaggtccagaagccgaggccgtaatagtggttcagcagcgcgaaggtgtacgcgccgatggcgtagaacccgccgtagcccagcaccagcaggccagacagccccaccaccacgttcagaccgagccccagaatcacgtagatcatggtcagggtggcaatatccaccgtcccgcgcgagaccataaacggccacgccacggcagccaccagcagcgccacaaggaacagcttctgtttcaccgttgtaccgtcgatcgccggcaggacgaatttcggcccggagacgtttttcagcgtcttctggaacagcggacgcaacagctggaacaggaacaccacagcggtgccgataaacacccactgccagcggatgtcgggagcggtatccaccaccagcttcgtgccgtccagtcctaactggacgcccataaagacgcccgccaggacgaagaacatggcggcagagagcagcgccatcgcaaaatgcatcggtttcatactttctctacctccggacggcccagaataccggtaggcattaccagcagaaccagaatcagcagggcaaacgacaccacatctttatattcggtgctcaggtacgccgaggagagcgcttcggccacgcccaggatcaggccgccgatcatcgcgccgggaatgctgccgatgccgcccagtaccgccgcggtgaaggctttcatcccggccataaagccgatgtacgggttgattacgccgtagaactggccgagcaacacgccagccaccgccgccatcgctgcgccgatcacgaaggtcagggcaatcacgcggtcggtgttaatcccgagcaggctcgccatcttcagatcttccgcgcaggcgcggcaggcgcgtcccatgcgggagtagcggatgaacagggtcagggccagcatggcaataaaggtcacaacccagataaccagctgcatggtggtgatggtggcagagaagttttcgctggcccccacaatccactggccgttaaacaggcttggcagcgccacgtcgcgtgaaccttcggtcaggctgacgtagttttgcaggaaaatggacataccgatggcggagatcagcgcgatcaggcgtttggagctgcgcaccggccggtaggccacccgttcaatactccagccgtaggcgctggcgatcacaatcgcgccgacaaacccggcggccaccagcagccagctgctgtcgatgcccatcatcatcagcgcggcgataatcataaaggagacgtagctaccgatcatgtacacctcgccgtgggcgaagttgatcatgccgataatgccgtaaaccatcgtgtagccgatggcgatcagcgcgtaggtgcttcccagcgtgacgccgttaaacatctgctgcaagaagtagagaaactgctcggacataagaaaacctttttatacccgcccggtgagccgggcggtgggatgattatttggcgaccgaggaagacccgtcggcgtgccacttaaagacaccaaactcaaatcccttcagatcgcctttctcatcccagttcagcggcccaatcacggtgttcgccccgtgtgcttttaaatctttcaccagatccagcggctctttactgccggtacggtccagcgcggtggccagagactgcacggccgcgtaggtgatccagacgtacggaccgctcggatctttcttctgcgccttgagcgcatccacgatagccttattcgccggatcctggtcatagcgttttggcatcgtcaccagcatgccttcggcagaatcgcccgcgatgttggacagggaggcattaccgacgccctctggccccataaactgggttttcaggccggtggcgcgcgcctggcgcagcatctgccccatttccgggtagtagccgccgtagtaaacgaagtcgatattctctttttgcaggcgggcgatcagcgcggagaagtctttctcaccagcggtaatgccgtcgaagaagacgatgtttgcgccgccttttttcaggccatcctgcacggaacgcgccaggccttcgccgtactgctgcttatcatggatgatggcgatacgctgcggcttaacggtttcaaggatgtatttggcggcggttggcccctgagaggagtccagaccggcggtacgcatgatgtgctggtagccgcgctgggtcagttccgggttggtggcacccggggtgatcatcagaatgccttcgtcttcgtagatatcagacgctggctgcgtggaggaggaacacaggtgcccgatgacgtactggataccgtcgttaacgattttgttggcgaccgcgacggcctgttttggatcgcaggcgtcgtcatactccacgcctaccagcttgtcgcctttgatgccgcctttggcgttgatatctttgatggcctgacgcgcgccgttgaactccatgtcaccccactgggcaacagggccggacatcgcccccactaccgcaactttaatgtcgtctgccatagcggcatgcgagatcgacagtgcgaccatccccgcgattaacgtcttcgcgttccttttcatctctgaatccccattcgtgatgtcatgtttatattttgttttattatggttaaaaagcattctgtactttttatgaacaacgctatttttaccagtgcctttaatggtttagcgcagttttttgtcaaaaaccagactaaaatctctatttttcaggcgattaagcaaagataatattctgaaatcaggcggagataaacaaataaaagcgcggtttgcagcataaaataacggtacaaagcgccgaataaatcactgcccttcaggttaaaattctgcttatttttcgatccatgtgttttcaaactgcccatcgcgctgccaaaaaactaatcacctggtaaatgggaagaaaaagagaaagcgcctgagcaaataaattgagtacactggccctactctttttgatttggacaagcagctaatgaaactgactatcgtgcgtctggtgacctttagcgaccaggatcgtatcgacctgggcaagatctggccggaatattccccttcatcgctggccgtcgatgaaaaccaccgcatctatgccgcgcgttttaatgaacgtctgctggccgccgtccgcgtaacgctgagcggcacggaaggggcgctggactccctgcgcgtgcgcgacgtgacccgtcgtcgcggggtcgggcagtatttgattgaagaggtgatccgcgaaaacccgagcgtaacctcctggtggatggccgacgtgggcgtagaggatcgcggcgtgatggcggcgtttatgcaggcgttagggtttacggcgcaggcgaacgggtgggagaagcgctaaaagaaagccgggtggcggctgcgaggtgctcatagtaggcccggtaagcgaagcgccaccgggcaaaagagggctgagcgggctgatgccctcaccccggccctctcccacggggagagggagaaaacattaaaaaaggcaacttgcgttgcctttttacgtttattttgcgtcagtcgccgtgccgttggcatgccagtcaaacacgccgaactcgaagcccttcaaatcgcccttctcatcccaggacagcggccccatcacggtttccaccgagttcgctttcagccaggtggcaatctccgccggatcggctgactggttcaggcccgcttgcagagactgcaacgctgcgtaggtggtccagacgaacgcaccgcttggatcctgtttcttcgccttgatggcatcgacaacaggtttgttcgcaggcacctggtcgtagttcttcggtttggtcaccagcagcccttcagcggattcacccgcgatattagacagggaaacgttcgcgacaccttctggccccatgaactgcgtcttcagacccgccgcacgcgcctggcgcaggatctgccccatttccgggtggtagccgccgtagtaaacgaaatcgatattttctttcttcagacgcgcgaccagggtcgagaagtctttctcaccggcggtgataccgtcaaagaacaccacgttggcgttcgcttttttcaggttatcctgcaccgcacgggccaggccttcgccgtactgctgtttgtcatgaacaatcgcgatgcgctgcggcttcactttttccacgatgtatttcgcggcggttggcccctgatcggagtccagaccggtggtacgcaggatcagcttatagccgcgcgcggtcagctctggcgccgtcgcggccggcgtgatcatcagaatgccttcgtcttcgtagatgtcagacgcgggctgggtggaagaggagcacaggtgaccgataacgtatttgatcccgtcgtttaccactttgttcgccaccgcgaccgcctgtttcgggtcacaggcatcgtcatattttacgatttgcagcttttcgcccttgatgccgcccttagcattaatgtctgcaactgcctgttccgcgccggtaaattcctggtcgccgtactgtgctaccggaccggacatcgcgcccaccacggccactttaatatcggcctgggccatagtgctgaatgccaacgcgatacatcctgccagtaacgctttacccttcatgttcatcctgagattccccattattatggttataacgattgttgtgatgttgttgtgtagcgctttatttcagttataggcgtgctgttcgcgctttttcagcatactctgctaaaacataccccatttttatgattttggaatagctaatttgaaatgaaaatatgataagcccgaccgttatttcagccgggcttttggctttatcgtgtcagcgaggcggaaataatatccagcgctttacggaactgcgcttcggggatggtgagcgggtagaggaagcgaataacgttgccgtaaacgccgcagctcaaaagcagcagcccttcgttcaacgcgcactcctgaacctgacgggtaaattccggcgacggctgtccggtttgcggatcggtaaattctaccgccaccatcgagccctgcccacggatatcggcgatatacgtacagccatccttcgctttattcagcacctcgaccagatgatgcccgagatgagacgcgcgggtgcagagatcgtcctcgtcaatcacatccagcaccgcatgggccgccgcaatcgccagcgggtttcccgcgtaggtgccgcccagcccgcccggggcgggcgcatccatcacctccgcccggccagagacggcagagagcggcatcccgcccgccaggcttttcgccatagtgatcagatcgggcttcacgcagtggttttccatggagaacagcttgccggtacgggcgaagccggtttgcacttcgtcggcaatcagtaaaatcccgtgggtatcgcacagggcacgcagcgcctgcataaaatcagcgggcgcgacgttgaacccgccctcgccctgaaccggttcaataatgattgccgccacctgatcgggcgcgatatcggctttgaagatgcgctccaggctttttagcgcttcggcggtactaaccccgtgcaggctgttggggaattgcgcgtggtacaccgagccggggaacgggccgaagccgagcttatagggcgccactttgccggtcatcgccatggtcataaaggtacggccgtggaacgcgccgccgaaggtgataaggccgggacgtctggtgtacgcgcgggcgattttcaccgcgttttcgaccgcttccgcccccgttgagaagaaggcggttttggctggcccctctatgggtacgcgctggttgatgcgctcggcaagcgccacataaccttcataggggacgatttgataagcggtatgggtaaaggcgtgaagctgtttttcgatggcggcgataactttaggatgacgatgcccggtattcagcacggcgatcccggcggcaaaatcaatatactcgttaccttccacgtcccacaccgtggcgttttcggctttatcggcatagaagttacacatgacgccgataccgcgcggcgtcgcctgtaaacgccggtcgttcagttcgttatttttcaccctgtcaccctctgaaagtcgcctgcttagcgcatcagtaagtgtttgccagggggaagaaattcgccagagcgggcgctaaaaaaacaaaacccccgaatttgcattcgagggttctcggtgtacttcgcggaaattacgcttcgatagcggcgcgaagttttttcatggcgtttttctcaagctgacgcacacgttcagcggagacgccgtagcggtcggccagttcctgcaacgtggacttgttatcttcgtccagccagcgggcacggataatatcctggctacgctcgtcgaggccttccatcgcgaaggtcagcttgttcgccgcctggtcttcccagttatcctcttcaatgccgtcagcaaagttagaggttttatcctgtagatacagaaccggggccatcggctggctatcggacgcgtcatcgtcggcagacatatcaaacgtcatgtcctgcgcggccatacgggattccatctcgcggacgtctttgctggaaacgcccagctcgcgcgccaccatttccacttcatcctgattgaaccagcccagacgctgcttggttttacgcaggttgaagaacagtttgcgctgcgctttcgtcgtggcgactttcacaatacgccagttacgcaggacgtattcgtgaatttccgctttgatccagtgcacggcgaaggagacgagtcgcacacccacttccgggttaaagcgacgtaccgccttcatcaggccaatgttaccttcctgaatcaggtccgcctgcggcaggccgtagcccgcataattacgagcaacgtgaacaacaaagcgcaggtgagacaggatcagcgttttagctgcttccagatcgccctggtaatgcagcttttcagcaagctccttttcttcctcagccgttaacatcggccaggtgttcgcagcccggatgtaagattccaggttaccaacaggggctaaagctaaagtttgcatttctttggtcattcattcctctcaatgtttcttctggtccaggttgtccccgtcaggcaacaaccatgccaaagcgtttgagcaacgagattagcattcactcttttatcagacagtgattttatccacaagttccaggtgcaacagtgaataaattacgcacaaaatgtgacatgaagatgattacaggggaagagacaacagggacgctttccctgcaagcgaacatctcggtgcagggaaagattatatcacgcttttattagtcgggagtaaagtggcgtaaatgttgaaccgttgccagccatgccgccacccagccgatcatggagcacaccagcagcaacagcaggcactcatcgaaccctaagccactgatatcaaacttagttccgaaaacctgcgccacttcagtcacggcagacgacagccgcatcaccaaaatttctgacaatatcaatgaaagaaatgcaccagaaaaacctaataacgcgccgccgtaaaggaacgggcggaggatgaaaccatccgttgcgccaatcagtttctgcacgttgatggtatcgcgacgggcgaagatgctcaggcgcacgctattaccgatgacgaggaacaccgccgccaccatcagcacgccgatcatcgccgacacgcgtcctaccagcccggtcagggcggcaagacgggcaaaccagctgtcgtccatgcgcacttcatcaatcccgttaatgcgggtaatgcggtcgcgcagggtgttgagcgaatccgtgccctggaaatcgagtttcgggatcaccaccgccacggcgggcagcgggttctcttcaagcatatccagcgcgccgccgaatccggaccagttgcggaactcacccagcgcttcatcgcgggaaagatagttcaccttctccacgccctgctcggcctgaatctgccccaccacctgagccgccgcgttatcgtcgagggctttatccagataaacggtgatctgcggcgacggatagtactgggacgccgcctggtttacgtttttgtaaaccatgtagcagacgctgggcagcgtcagggagatggcaatcaccatcaccgtcaggaacgtcgccagcggtttgcttttcagatcctgcaacgcgccctggaaggcgtaccgcacctgctcgttaaagacgttggttttgcgggagttcggtttcggtgccgctttggcacgcttaggcgcattgcgattgccgtccccgccgccctgaggcttgcggaaacggtcaaaccggttgctgaactgccgaatctggttcattgcatcacgcttattcaccgtggcctccgtgcaaatgcccgtcgctcagggtcagcatgcggtacgaacggcgggagatcagccccatgtcgtgcgtcgccatcagtaccgtgacccccacgcggttaaattcctcaaacagacgcaggatcccttcagagagggcatcgtccaggttaccggtcggttcatccgccagcaaaacggcaggcttgttcactaccgcgcgggcgatacccacgcgctgctgctcaccgccggagagctggatcgggaagttcttcgctttgtccagcagcccgaccttatccagcgccgccgaaacgcgacggcggatatcatcgtaactggcgccagcaataatcagcgggatcgcgacgttatcgaaaaccgtgcgatccatcagcaggtggtgatcctggaaaatcatgccaatctgacgacgcaggaacggcacttcacggttcttaagacggctaatttcatggccgctgaaccagattttcccggcgcttggccgctcgatcccacagatcagcttgagcagggtacttttccccgcgccggaatggccggtcaggaatgccatctcgcctggctggaggtggaatgtcaccccctgtagcgcttgtctcccgccgagataggccttgctgacgtgttcaaagcgaatcattgttagtcctctcgggcaaatagtgcctcaataaagtcgtccgctttaaacggacgtaaatcctcaatacgctcgcccacaccgatgtaacggataggaatgccgaactggtcggccacggagaagatcaccccgcctttcgcggtcccgtccagcttggtcagcgcgatcccggtcagtcctaccgcttcatggaacagtttcgcctggctgatggcgttctgtccggtgctggcgtcgatagtcagcataatttcatgcggtgcatcttcgtccagcttcttcatgacgcgaacgattttcttcagctcttccatcaggtgcgatttgttctgcaaacgccctgcggtatccgcaatcagcacgtccacgttacgcgacttcgccgcctggatggcatcgaaaatcacggacgcggaatccgcgccggtgtgctgagcaataaccggaatattgttgcgctggccccacacctgaagctgttccaccgctgccgcacggaaggtatcgcccgccgccagcatcaccgatttgccctgctgctcaaactggcgcgccagcttgccgatggtggtggttttgcccacgccgttgacgccaaccatcaggataacaaacggcattttgccttcaatattaagcggttcgtcaacttttgcgagaatttcacccatctcgtctttcagcaggccgtacagcgcctcggcgtcacgcagctgtttgcggctcgccccttcggtcaggttggcgatgatcttccgggtggtttccacgcccacgtccgcaatcagcagctgctcttccagctcctcaaacagatcgtcgtcgatctttttgccgcggaacagactgataaatccggaacctaagttttctttggttttgagcaggctgcgcttcaggcgcgcaaagaaaccttctttggtcggtttttcctgctcctgaacgatctcttcttcggcctgcgcttccaccggcacgacgatgaccgcttcttcagccgcttccgccgccagcgcctgggcttccagctcttcgtcggtcagctctggctcaagggccgcttcttcttccaccgcctcaacaatttcaacggtttccgcttcggcctgccactcttcggcagaaacctcttcagctttcacctcttccggcagcggcagctcttcgtgttcgatagtggcctgcggcgcttcgttaagggtttcaacgataaccggctctggtttttcgctctcctgaacctgttcagtaacctcaaccacctcttcggcaaaggattcaatctcttctttgctgtgggctggctcttccgcttcgacaaccgcagcggtttcgacaggcgtttcaggctgtgacggctcttctacaacctgctgttcttcggttttctgttctgtttcttgctctttttcaccgaaacccaaccaggaaaagaagccacgttttttttgttttgccatctgcgactacactcctcgcggcgctatatacagggaagctaaaaaaatgatgaaatagtctaacactttacttaattgacatcaccgcccgcaatcgcagggcaatggttaacagagctttcctgagatgaagaaacccacccgcgccccggccggtcaaattcgcattatcggcggtcagtggcgaggccggaaattaccggtgccggacagccccggtttacgccccaccacggaccgcgttcgcgagacgctgtttaactggctcgccccgtctatggtagacgccaactgcctggactgcttcgccggaagcggtgcattggggctggaagcgctgtcgcgttatgccgccagcgccacgctgctggagatggagcgcggcgtcgcgcagacattgcagcaaaatctggctacgctgaaggcaaccaacgcgaaagtggtgaataccaacacgctgagcttcctcgcccaacaggggacgccgttcaacgtggtgtttgttgacccgccgttccgtaaagggctgctggaagagacattatcgttgctggaaaaaaatggctggctggcagacgacgcgctgatttacgttgaaagcgaagtggaaaatggcctgccgcccgttcccgttcactgggatctacaccgcgagaaggtcgccggccaggtggcttatcgtctgtatcaccgtcaggcacaaggaggatccgatgccagtactgattaacgtagggcgcgtgctgatgctgggcgtctgggcatttttgattttgaatctggtgcacccgttcccgcgtccgctgaatatctttattaacgtggcgctgatttttaccgcgttcatgcatgccttgcagatggtgatgctgaaaaacggtctgcctaaagatggcccaccgatgaccggctggcagcagctgcgggtgtttattttcggcgtgtttgagctgctggtgtggatgaagaagtttaaggcgcaggtgaagaagtaggcccctcaccctaaccctctccctaggggagaggggacgattacaccctctcccctagggagagggccggggtgaggggaaaattacagctccggttcaaatccttcaaaccgcgaccctttgtagctcagcgtgcctttctcccccaccgtcagctggtggtactgctgtgccgccaggcggaaggtcatctccagcccgccggtttccggcttaaagctcgcttcatagcgcatcgttgtgcccgctggcgtcacctgctgctggcgggagcggcggtcgttgagcggcttctcacgcttgttcgtcaccaccacgcgcttttgcatcagcggcgcggcgtcattgtcggccttctcacggcgctgctgcacgaagcgaaacgaggcggcaatgacgataatcgccaccacgataatgaaaaacagcggcatcttgctcattgaaaagtcccatcagattatgcggaattcaggatacctcgcctgccccggcattgccaaacgcccgctcgcgtcactacactggatcaggaactgatcattcagcctcaacagttacagggagttaatatgctttggtcatttatcgctgtctgtttttccgcatggctttacgtcgatgcgtcctaccgtggcccagcctggcagcgctggttgtttaaacccgtcacgctattactcctgctgttgcttgcctggcaggccccgatgtttaacgccgttagctatcttgtcctcgcggggctgtgtgcttccctgattggcgatgccttaaccctgctgccgcgccagcgcctgctgtacgccgtgggggcgttcttcctgtcgcatctgctctataccatctactttgccagccagatgacgctctccttcttctggccgctgccgctggtgctgctggtgattggcgccctgctgatcgcggtgatctggtcgcgtctggaagagatgcgtctcccggtctgtacgtttatcgccatgacgctggtgatggtgtggctggcgggcgagctgtggttcttccgtccgaccgctccggcaatgtctgcgttcttcggtgccgcactgttgctgttgggtaatatcgtctggctgggcagccactatcgccgccgcttccgtgcggataatgcgatttccgccgcctgttactttgccggacacttcctgattgtgcgttcgctgtatatctaaataacgcttgactctggagtcgactccagagtgtatgctgcggttaatgagaaaattatcattaccggagactgccatgtcgactccagaaatacctaaaaaagttccccaattctcggcacttaagctcagcccggttccgccaaaagaggactgctgctgcgagggcgcgtgcgaaacccggaccgaagcgctgcctgaaaacggcaatcactacagctgggtggtcaacggcatggactgcgcggcctgcgcccgcaaagtggaaaacgcggtgaagcaggtgccgggtgtgaaccacgttcaggtgctgttcgctaccgaaaagctgctggtcagcgccgaaaacgacgtcagcagacaggttgaagccgccgtcagcaaagcgggttataccctgcgcagcgaaacggcgcccgcagaaaaaacctctcccctgaaagaaaacctgccccttatcaccctcatcatcatgatggccctgagctgggggctggagcagatcaaccacccgctcggcaacctggcgtttatcgccaccacgctggttggcctgttcccgattgcgcgtcaggcgctgcgtctgatgagaagcggcagctggtttgccatcgaaacgctgatgagcgtggcggctatcggggcgctgtttattggcgcgacggccgaagcggcgatggtgctgctgctgttcttaattggcgaacgccttgagggctgggcggcgagccgggcgcgtaaaggggtgagcgcgctgatggcgctgaagccggaaaccgccacgcgggttattcatggtcagcgtgaaacggtcgccatcaataccctgcgcccgggcgacgtgattgaagtgcccgcaggcggacgtctgccagccgatggggccctcattaccgccaccgcgagctttgacgaaagcgccctgaccggggaatccatcccggtagcgcgcgcggcaggtgagaaggtgcctgcgggcgccaccagcgtcgaccgactggtgctgctgacggtcctttctgaaccgggcgacagcgccatcgaccgcatcctcaggctgattgaagaggccgaggagcgccgcgcgcccgtcgagcggttcatcgaccgcttcagccggatttacacccccgccatcatgctggtcgccctgctggtcaccgtcgtcccgccgctgttcttcggcgcgccgtgggagggctggatttacaaagggctgacgctgctgctgatcggctgtccgtgtgcgctggtgatctccaccccggcggcgattacctcagggctggcggcggcggcacggcgcggggcgttgattaagggcggcgcggcgctggagcagctgagccagattcagcacatcgccttcgataaaaccggcacgctgaccgtcggcaagccgcaggtgaccagcgtgtatccgcaggacatcagtgaagacgagttgcttatactggccgctgccgttgaacagggctccacccaccctctggcgcaggcgattgtgcgtgaagcgaaggggcgcgggctgaccatccctccggcaaccgcccagcgagcgctggtcgggtcagggattgaggctgtggtcgaaggcaaaaaagtgttgatcgccgcggcaggcgcgttcccgaatccacaggttgaggcattagagcaggccgggcagacggttgttgccgtgatgcaggacggtgtaccgatgggcatgctggcgctgcgcgacaccctgcgtgacgatgcgaaagacgccgtcgacgcgctgcacaggctgggggtacagggcgtgatcctgaccggtgataacccgcgtgcggcggcggcgattgccggcgagctggggctggagtttaaggccggattgttgcctgcggataaagtcagcgcggtaaccgagctgaacggtcatgccccgctggcgatggtcggggacgggataaacgatgccccggcaatgaaggcttccaccatcggcattgcgatgggcagcggcaccgatgtggcgctggagacggcggatgcggcgctgacccacaaccgcctgaccgggctggcgcagatgattagcctggcgcgggcgacgcgcgccaacatccgccagaacattgggattgcgctggggctgaaggggatattcctcgtcaccacgctgctcggcatgaccggactgtggctggcggtactggcggatacgggggcgacggtgctggttacggcgaacgcgttgcggctgttgcgccgtcggtaaaaatgcccggtggcggctacgccttaccgggcctacaacatctccgaaccgtaaccgtaggccgggtaaggcgtagccgccacccggcataaaacggcgtcactgcatccctagcacccccggcaaccacaatgatatcgccgggatgtacgtcaccatccccagcactaccagcaacataccgtaaaacggcagcatcgcccgcaccacgtgctcgatcttctgcttactcaccgcgctcgccacgaacagcaccgacccgaccggcggcgtgatcagcccaatccccaggttcaccatcatgatcatcccgaaatgcaccggatcgatccccagcgagttggtcaccggcagcagtaccggggtcaggatcaggatgatcggcgccatgtccattagcgtgccaatcagcagcagcatgatgttgaggtacatgaggatcacgtatttgttatcggacagcgacgtgaagaattcggtgatgcgcatcggcagctgcatgtaggtcattaccgcgccaaacgccgcggcaaagccaatcaaaatcatcacgatggtgacggttttcaccgtgcggcacatcagcttcggcagttcattccacttgtaatcgcggtaaatgaacatggtgacgaagaacgcccacaggcaggccacggcggcagattcggtcgccgtgaatatcccggacaagatcccgccgaggataatcaccaccgtcatcagcccccacagggcatcgagcatgattttcagcgcctgcctgaacgggattttatcccccttcggatagccgcgcttgcgggcgaagcacaggcagagcaccatcaggctcacgcccagcagcaggcccggcagcacgcccgcgataaacagcgtggcgatggagaccgttccccctgccgccagggagtaaatcaccgagttgtggctgggcgggatcaggatcgcctgcaccgacccgctggccgtcaccgccgccgcgtattcgcgcggatagcccttcttctccatctccgggatcatcacgctgccgatagacgccgtatccgccaccgacgagccggaaatcgcgccgaagaacgttgatgccacgatgttcaccagcgacagcccgccgcgaataaagccgacaaaaacgtacgcgaagttgaccagccgtcgggcaatgcccccttccgccatgatcgccccggcaagaatgaagaacgggatcgccagcagggtaaatttattcaccccgctggtgatctggatcatcagcgcctccagcggcaggtcaatccacagcgcgcccgccacggcgcttaagccgacggcgaaggccaccggcatccccagcgccagcaaaatggcgagggtgaataacaaaacaaacgcatccattgttcaccccttaactgtgattgccgatcagcacgaccggacggttttcctgcgagccaaacagcaggcgttcaagcacaaacaggatcaaaatggccgacccgacaggtagcggcagatagctttcgccggaggtcagaagcggaaactccgccaccggctgctcccacagctcgacgcacagccagtagctataccagcacatcaggcctgaaatcagcagcatcagcagatccaccatccgcgcgcacactctttgcagcgacgcgggcaggcggtcggtgagcatgttgaccgcaatatgcgacccggcgcggtagctcaccgccgcgccgataaaggtaaacgtcaccatgcagataatggcgatcggctccggccaggattcgccgcgattgagcacgtagcgtgaaaaaatgccgatggggatgacaatcgtcatcaccaacagcgaaatacctgccaccgccatggcgaacaggtacagacggtccatccacttcaggtagagttcggacatacgtactccggcttactgaacgtcagcgatggctttcatcagatcctgatgcttatcgccatactgcgcgcgcaccggctctgtcgccttgataaacaccgttttatcgatgtcgtggaactgcaccccgccggccttcattttcgccagcgcctggtcgttatacgcattccacagcttgcgctgctcgaactgcgcttcgcgggccagcaccaggatcttttgctgttcgtcagcgctgagcttgtcccatttcactttggaatagagcagcatttccggggtgatgaagtggccgctcagcgtatagtttttggcgaccggcatatagttgtgggcgataaaggttggcgggttgttctccgcgccgtcgatcaccccggtctgcatgccgctgtaaacctcgctgacgcccatcgccaccgagttcgcccccatcgctttcagcgtggccagcgccaccgggctgccctgcacacggattttcttccctttcagatcgtccggtttgacgatcggctctttggtgatcaggttacgggtgccggaatccatccagccaaggaagaccagacgcgatttcgggttggcggtgagtttgtcgccaatctgcttgccgatatccccgtcgatcaccttgtgcatgtggtcttcatcgcggaatacgtagggcagcgtaaacacttcgatatccggcagaatggcagccaccggcgccatggagacgcggatcatgtcgatcgcccccatctgcgcctgctcaatcatctgcttttcatcccccagcacgccgccggggaagaccttaatctccagcttgccatcggtttgttgtttgagtttttcacccatgtgctgaaccgccaccacgttcgggtagccttcgggatgcacatcggcggctttgatggtctgggcagaaacggtgcaggcaaaagcagacaggcacagcgcggccagtaacggcttgagggtcgttttcattgagtcaactccagggtagtgagataagcgttaaaacggtgttttagtttttgacgcttaaaaattagactacggctggaaaagggagggtgaagcgcctcacaaaagcgcgaaattttgaaacgatggttcgaaattgtgatgagtacttgtcgggtggcggctgcgccttacccgacctactacacccgtaggcccgtgcaagcgaagcgccgccgggcgtcaggccgcacttaccccttacgaatcaaataccggtacggcaaggtctcggtttgctgcgccaccagttcatgttccataaaggtacaaaagccggggatatcacgggtggtagccgggtcgtcagcgacgatcagcagcgtttcgccactctgcatgttacggacggttttacgcaccatcattaccggctccgggcagcggaggccctgagcatcaagcgtgtggtctgggctggaaaacaggtcggtcattttcttctcgttcaggtaaaaacggctgtagtttacgccccgctatcgccaatgcaaaccaggttaacgattgcgtgaaaattagccattgcaaagtgtcgtcaaagcagtatcatgcggcggctttattgggttccctcaccccaaatattaatcaaaaaggtacaatatgaactcctttacacaatcgcagcgcgtcaaggcgttgttctggctttcgctatttcatctgctggtgatcatctccagtaactatctggtacagctccccatctccatttttggtttccataccacctggggcgcgttcagtttcccgtttattttccttgcgacggatttaaccgtgcgtatttttggcgcaccgctggcgcggcggattatttttgcggtgatgatcccggcactgtttgtctcctacgccatctcctcgctgttttacatgggcagctggcagggcttcgaagcgctgacgcacttcaacctgttcgtcgcgcgtattgccaccgccagctttatggcttatgccctggggcagatcctcgatgttcacgtgtttaaccgcctgcgtcaaaaccatcgctggtggatggcaccaacggcctccacgctgttcggtaacgtgagcgatacgctggccttcttcttcatcgccttctggcgcagcccggacgccttcatggcagaacactggatggaaatcgctctggtggactacgcctttaaggtgcttatcagcctggttttcttcctgccgatgtacggcgtgctgttgaatatgctgctgaaaaggctggcagataaatctgaaatctccgcattgcaggcaggttaagggttcgctttatcagttgtgataagatgaacgaatgagccgttatggccgtttatcgaaaggaagaagtcaatgcgcaatctggttaaatatgtcgggattggcctgctggttgttggccttgcagcctgtgataacagcgacaccaaaacgcctgctcagggcgcgtcagcagaaagcaacgccactggtcagccggtgagcctgatggatggcaaactcagtttctctctgcccgcggacatgaccgaccagagcggtaagctgggcacccaggcgaacaatatgcacgtctattccgatgccaccggccaaaaagcggtgattgtgatcgtcggtgacgataccagcgaagatcttggcgtgctggctaaacgcctggaagatcagcagcgcagccgcgacccgcagcttcaggtggtcaccaacaagtctgttgaactgaaaggccacacgctgcaacagctggacagcatcatctctgccaaaggccagaccgcctactcctccgtggtgctaggcaaggtggacaataaactgctgaccatgcagatcaccctgccggcagacaatcagcagaaagcgcagaccgccgctgaaaacatcattaacaccctcgtgatccagtaatcgttcaccaggatgccgtggcctccgtcgcttgcgccgggggccatttttttgccacgactttcagactaacgctccagacgaagcccatccggcgcactacaattaacacgccccccggaaaaaggaattcttatgactgccagcccgcccgacaaagccggacttcatattttattaaaacttgcctgcctggtggttatccttgcgggtatccacgcggcggcggatatcattgttcagcttctgctggcgctgtttttcgccattgtgctcaacccgctggtgacatggtttttacgccggggcatcagccgcccggtcgcgattaccattgtggtgatggtgatgctggttgtcctgacggcgctgttcggcgtgctcgccgcctcgctgagcgaattttccaccatgctgccgcagtacaataaagagctgacgcgcaagctggtcgatcttcagcgcatgttgccgttcgtgaatctgcatatctcaccggaacggatgctgcgtcggatggattccgagaaggtgatgacctacgccaccacgttgatgaccgggctttccggggcaatggccagcattctgctgctggtgatgacggtggtgtttatgctgttcgaagtgcgccacgtgccgtataaactgcgttttgccctgaacaatccannnnnnnnnnnnnnnnnnnnnnnnnnnnnnnnnnnnnnnnnnnnnnnnnnnnnnnnnnnnnnnnnnnnnnnnnnnnnnnnnnnnnnnnnnnnnnnnnnnnnnnnnnnnnnnnnnnnnnnnnnnnnnnnnnnnnnnnnnnnnnnnnnnnnnnnnnnnnnnnnnnnnnnnnnnnnnnnnnnnnnnnnnnnnnnnnnnnnnnnnnnnnnnnnnnnnnnnnnnnnnnnnnnnnnnnattgccggcttgcaccgcgcgctgaagggcgtatccaaatatctggcgctgaaaacgctgttaagcctgtggaccggcgtgatcgtctggctggggctggtactgctggacgtgcagttcgcgctgatgtggggcgtgctggcgtttttactgaactacgtacccaatatcggcgcggtgctttccgccgttccgccgatgatccaggcgttcctgtttaacggtttttatgagtgcatgctggtaggtgcgctgttcctcgtcgtgcatatggtgctgggtaacattcttgagccgcgcatgatgggccaccgtctgggcatgtcgacgatggtggtgtttttatcgttactgatctggggatggctgctgggtccggtgggcatgctgctctccgtgccgctcaccagcgtctgtaaaatctggatggaaaccacgaaaggaggcagtaaactcgccattcttctgggtccgggtcggccaaaaagccgtttgccgggataaccgggtggaaagggtcaaaagtgacgtttattcgccagcgcgacgacaacattgtacgatgtgcgcagcaaatcgcgctggcgaagaaaaagtcacagaaacaggtttatcgcggacgcgcgtagatgaaatttacacttacccttatcgactggcaggcaagagcgccaggactcagcgatgccgacgaatggcaggcatggtcacgccggtctgacgccatcgatcccgctgcaccgctggcgaaactgaccgatctgccgatgatgaccgcccgccgcctgaattcaggcagcaggctggccgtcgatcttggcctgatgatgctgcgcaaacaccgcatcgatgccgtcgtctacagcagccgtcatggggagctggagcgcaatttccgtattctccaggccctggcggcagaacagcccgtttcccccaccgattttgccatgtcggtacacaactcggcggtcggcaatctcactatcgccgcgcgtcaacctgttgtctcttcgtcggtttccgccggtatggataccttccagcagagcttgtgcgacgtgctgagcctgctgcatgcgggctactcccgcgtgttgctggtggatttcgacggtctgctgcctgatttttatcacgccgggctgccgccgcagatgcccgtctggccctacgcgctggcgctggtgattgaggccggaaatacgctcagctgtgaaacgcacgtcaaccgcgcgcctgaagagcccgcgctgccgcaaagcctccagttcctgcgccattacctgcgggacgagcgccagtttaccctgccgggcgagcgcctgctgtggcaatggacgcgccaatgagagggttacgttcccgcctcgatcgggtatggcggatgctgatgaccggattgtgcttcgtcctgttcggcctcggcgggctgacgctgtcgctggtgtggtttaacctgctgctgattttccagcgcgaccgcactcaacgtcgccgcctggcacgccgcactatttctgccagttttcgactgttcctcgcggtggtacgcggtgcaggggtactggattaccgtttcaacaacctggacgttctgcgcgccgagcggggctgtctggtgattgcgaatcatccctcgctgctggactacgttctactggcgtcggtgatgaacgaaaccgactgtctggtgaaaagcgcgttgctgcgtaacccgttcgtcagcggcgtgatccgcgcggctgactatctgattaacagcgaagccgacacgctgcttgccgcaagccagctgcgtctggcccagggcgacaccctgcttatcttccccgaaggcacccgcacccgggtgggggaagccatgaccctgcaacgtggggcggcgaatatcgccgttcgctgcaacagcgccgtgcgcgtggtggtgatccactgtagtgaacggatgctggataaacagagcagctggtataacgtgccccccaacaaacctgttttcaccgtggatgttcgcgaacgcatcaacattcatgatttttatgatgcgagtcagcacgaacccgcgctggcagcaaggcagttaaaccggcatatgcagcatcagttaacaaccggtcttcaatctttgtcaggaacgaaagatgcaagcgctctatctcgaaattaagaatctcattatctctacgctgaatctggaagaacttaccccagaggatattgatacagacgccgcgctctttggcgacggcctcggtctggactcaatcgacgcccttgagctggggctggcggtaaaaaatcagtacggcgtagtgctttctgccgaaagtgacgagatgcgtcagcacttctattccgttgccacgctcgcggcttttatccatcaacaacgcgcctgagaatgaccgctatgacagaacaacaaacgatttatcaggaagtctctgcgcttcttattacgctgtttgaaatcgccccggaggatattacccctgaggcacgtctttacgaggatctggacctcgacagcattgatgccgtcgatatggtggtgcacctgcaaaagaaaacgggccataaaatcaagcccgaaaccttcaaagcggtgcgcacggtgcaggacgtcgtggacgttgtggaacagcttcagcgcgacgcgtaacgtgcgttcgattccagttcttcccgccctgacggggctgatgctgctggcatggccgtttttgatcggcttcgggctggcgaataatagcctgcacgggatactgcccgtgatggcgctggtgctgctgttgcgcgtctgccaggcccgtcggcagggcggccccctgcgttatctgttcgtgagcgtggcgctggctggcatagcgctttgcgcggcgagctacgtcctgcacgcgcaccagtgggtgctgttatatccagtggtggtgaatctggtgatgctggtggtgtttggcggttcgctgtggacggcaatgcctgtcgttgaacggctggcgcgcctgcgtgaaccggatctctcccccgtcggggtacgttacacgcgccgggttacccaggtctggtgcggctttttattatcaacggggcgatcgcgctgtttaccgtattacacgccgatatccgtctgtggacgctgtggaatgggatgattgcctatctcctgatgggcacgctgatggctggcgagtgggtggtgcgacaacgggtgatgaaaaacgatgcttaaccctcttccgcttagccagtggctcagtgcgccccgccctgacaacacccctgtcgcctggcaggacgaccgcctctggacgcttggcgatctgcgccacgacgtcactcagttggtcgacacgctgcgtcgtgaagatagcgagcgctgggcgttgtgcatcgaaaacggttatctgtttattgtcgcgctgctggcgacgctgcatgcgggtaaaacgccggtcctccccgggcacagcnnnnnnnnnnnnnnnnnnnnnnnnnnnnnnnnnnnnnnnnnnnnnnnnnnnnnnnnnnnnnnnnnnnnnnnnnnnnnnnnnnnnnnnnnnnnnnnnnnnnnnnnnnnnnnnnnnnnnnnnnnnnnnnnnnnnnnnnnnnnnnnnnnnnnnnnnnnnnnnnnnnnnnnnnnnnnnnnnnnnnnnnnnnnnnnnnnnnnnnnnnnnnnnnnnnnnnnnnnnnnnnnnnnnnnnnnnnnnnnnnnnnnnnnnnnnnnnnnnnnnnnnnnnnnnnnnnnnnnnnnnnnnnnnnnnnnnnnnnnnnnnnnnnnnnnnnnnnnnnnnnnnnnnnnnnnnnnnnnnnnnnnnnnnnnnnnnnnnnnnnnnnnnnnnnnnnnnnnnnnnnnnnnnnnnnnnnnnnnnnnnnnnnnnnnnnnnnnnnnnnnnnnnnnnnnnnnnnnnnnnnnnnnnnnnnnnnnnnnnnnnnnnnnnnnnnnnnnnnnnnnnnnnnnnnnnnnnnnnnnnnnnnnnnnnnnnnnnnnnnnnnnnnnnnnnnnnnnnnnnnnnnnnnnnnnnnnnnnnnnnnnnnnnnnnnnnnnnnnnnnnnnnnnnnnnnnnnnnnnnnnnnnnnnnnnnnnnnnnnnnnnnnnnnnnnnnnnnnnnnnnnnnnnnnnnnnnnnnnnnnnnnnnnnnnnnnnnnnnnnnnnnnnnnnnnnnnnnnnnnnnnnnnnnnnnnnnnnnnnnnnnnnnnnnnnnnnnnnnnnnnnnnnnnnnnnnnnnnnnnnnnnnnnnnnnnnnnnnnnnnnnnnnnnnnnnnnnnnnnnnnnnnnnnnnnnnnnnnnnnnnnnnnnnnnnncgctcatttccgggcagcccgtttacgatgactcaatcccccgttcgcgcctgtacgggcgctggataacgcacgtctgggtctggattgaaaccctctccctgcaactgaaagacagtatgtgcgggtttcgcgtttacccgatagccccggttctgcgccttgcagcaaccacgccgctcggcaggcgaatggattttgataccgaagtgatggtgcgcctctactggcagggcaacaccagctattttctgcccacccgcgtgacctatccgccggacggggtatcccattttgatgccctgaaagacaacgtgcgcatctcgttgatgcatacccgtctgtttctcggcatgctgccgcgcattccttccctgctgatgcgtcgccgctcgcagcactgggcgcagcagcaggaggtaaaaggattatggggcatgcgcctgatgctgcgcgtctggcagttgctggggcgtaaggcgtttaccgccctgctgtggccggttaccgccgtctactggctgaccgcccgctctgcgcgtcaggcgtcgcagcagtggctggcgcgggttaaaacggtgatggcacagcggcaaatgccgcccctcgcgcggctaaacagtttttcccacttcctgcgcttcggtcatgccatgctgaataaagtggccagctggcgcggcgaaatgaaactccatcgcgatctggtctttgcgccaggcgcgcaggaggcgctggggctcgacgatcctcagggcaaactgctgctcgcgtcgcatcttggcgatgtggaagcctgccgggcgctggcccagcgcgaaggggcaaaaaccatcaacgcgctggtctttagcgacaacgccagacgttttaagcaggtgatggaggagatggcgccgcaggcgggcattcacctgatgccggtcaccgacattggcccggagactgcgatcctcattaaagagaagctggatcgcggcgaatgggtggcgatcgtgggcgatcgcatcgccgtcaccccgcagcgcggcggtagctggcgggtgatatggagcgaatttatgggccagcccgcgccgttcccgcaggggccgtttatcctggcgtccattttgcgctgcccggtggtgctgatttttgccctctgtcagcagggaaagctgaccctgcactgcgagccgtttgccgacccgctgctgctgccgcgcggcgaacgccagcaggcgctacagcagaccgtcgaccgctatgcgcagcggctggagcattacgcgctcttgtcgccgctcgactggtttaattttttcgatttctggcagctgccagaggtcaacgataaggagtaaagggtgctgaccgatccccgctttacggctgaagttgaaatcaccgttccgttccacgacgtcgatatgatgggcgtggtgtggcacggcaactacttccgctactttgagattgcccgcgaagcgctgctcaaccagtttgattacggctatcgccagatgaaagcgtccggctacgtctggccggtggtggatacccgggtgaaataccgcgacgcggtgaccttcgagcagcgcattcgcgtccgcgcccacattgaagaggttgaaaaccgtctgcgcatcgcctatcaaatcttcgacgcgcaaaccgggaaacgcaccaccaccggctacaccatacaggtggcggtggaagaagcaagccgggagatgtgctttgtcagcccggccattctgttcgaacgcatggggatcgcgccatgaaatggataacgctactcgcgctgctggtaagcccgctggtgaacgcgatcacgctggatgaactgcaacagcggtttgcggagcaaccggtagtgcgcgcacacttcgaacagacccgcacgatcaaggacatgcctcagcccctgcgctcgcagggggagatgctgatcgcccgtgacaatggcctgctgtgggatcaaaaagcgccgttcccgatgacgctgctgctggatgacaaacggatggtgcagatcgtcaacggtcagtcgccgcagaccattaccgccgacactaacccgcagatgttccagttcaaccatctgctgcgggcgctgttccaggccgaccgcaaggtgctggaagagaacttccgcgtcgatttcaaagacctgggcgaaggccgctggtcactggtgctgacgcccgtcaccacgccgctggacaagattttctccacccttgatttgaagggcgcgatctatctggaatccattcgcctgaacgataagcagggcgacacgacggatatcgccctctcccgccaccaactgacgcccgcccgcctgaccgatgcagaacgccagcgctttgccgcaccgtaacgccctgcgcccggcgctgctgtgggccgcggtatgcctgatcctgttgggcgtgctgctgtcgctgctgcccggcgcgcggctgaacagcagcgtgctcgccatgctgccgaaacagacgctcggcgcgatccctcccgctctcaacgacggatttatgcagcgcctcgaccgccagctcatctggctggtcagccccggcaaacagccggacccgcgcgtggcgcagcagtggttaaccctgctgcaacgcagccaggcgctgagtgtcgtaaaaggtccgctggacgccgccgggcaacaggcctggggagatttcttctggcaacaccgcaatggcctggtcgatccggccacccgcgcccgcctgcaaaacggcggtcaagcacaggcccagtggatcctgtcccagctctactccgccttttccggcgtgagcggcaaggagctgcaaaacgatccgctgatgctgatgcgcggcgcgcagctcgcgctggcgaaaaacagccaaaagatgcagctgatggacggctggctggtgacaaaagatgcggccgggaactactggtatctgctgcacggcgagctggcgggctcatcgtttgatatgcagcaaacccaccagctggtgaccacccttaacgcgttgcagcagacgctgaaaagccagtatccacaggcgcagctgctctcgcgcgggacggtgttctacagcgattacgccagccaacaggctaaaaacgatatttccacgcttggcgtcgccacggtgctcggggtgatcctgctgattgtgtcggtgtttcgctccgtgcgtccgctgctgctgagcctgctctccattgccatcggcgcgctggcggggacggtcgtgacgctgctgctgttcggtgaactgcacctgatgacgctggtgatgagcatgagcatcatcggcatctcggcagactatacgatttactacctcacggagcggatggtgcacggcgcggaacactcgccctggcaaagcctggcgaaagtacgtaacgcgctgctgctggcgctgctgaccaccgtcgtggcgtatctcttcatgatgctggcccccttccccggcattcgtcagatggcggtgttcgccgccgcagggctgagcgcctcgtgcctgacggtaatgttctggcatccgtggctgtgccggggcatgccggtccgcccggtccccctgagagggatgatgcagcgctggctgaacgcctggcgcgacagtaaacccctctctgtcgggctgccggtagcgctggcgctgctctccgccatcgggatcgccagcctgcgggtggatgacgatatcgcccggcttcaggcgctgccgcaggacattctggcgcaggaaaaaaccatcaccgccctgaccgggcaaaatgtcgatcagaagtggttcgtggtgtacggcgcgtcggctcaggaaacgctggagcggctggaggcgtttaccccggcgctggcgcaggcgcaaaaagccggtgaattaacccgctggcgcaccctgccgctgaactcgctggcgcggcagaacagcgatctgcatcttctgcgtaacgccgcgccgacggtgatgaaaatgctgcaaagcacggggctgaagaccagtgaaccgaacctgaacgccatgcctgtcagcgtggaagcgtggctcgccagcccggccagcgagggctggcgtttgctgtggctgacgctgccggacggcaaaagcggtgtgctggtcccggtcgatggcgtcagaaacagcgccgcgctcggcgaactggccgcccgccatcccggggtcgtctgggttgaccgtaaggccagtttcgacagcctgtttgcgctctaccgctcgctgctgacggggctgctgggcgtggcgctggcggtgattgcctgcggcgcgatgctacgcctcggctggcgaaaagggctggtggcgctggtgccgtccgtgctgtcgctgggcggcgggctggcggcgctggccgtgacgggccatccggtgaacctgttttccctgctggcgctggtgctggtcctcggcattggcattaactacacgctgtttttcagcaacccgcgcggtacgccgctgacctccatgctggcgattaccctcgccatgatgaccaccctgctgacgctggggctgctggtgttcagcaccactcaggccatcagcagctttggcattgtgctggtgagcggtatcttcaccgcgttcctgctcgccccgctggcgatgccgtctaacaaagagaacttaccatgacccgtttcattcgcctggcggcagtgatgatggccctgttgctggcggggtgtagccatacgacgaaccgcgatgacgcgcgccctcaggccaggctccagcccggcacccgcgtcacgctgcccccgccgggcatcacgcctgccatccgcgcgcagcagttgcttaccggcagttttaaaggccagaccccgtcgctgctggtgatgctgaacgccgacggagataaagtgacgcttgccggcctctcttccgtcgggatccgcctgttcctcgccacctacgacgacaccgggatccacaccgagcagtcggttgtgatgccacagctgccgcccgccagccaggtgctggccgacgtgatgctgagccactggccgctcagcgcctggcagcagcagttgccgaaaggctggacgctgaacgatactgacaccagacgcgaactgcgcaaccccgagggcaaactggtcacggaaattgtctacctgaaccgtaacggcaggcgcgatccgattagcattgtgcagcacgcttttcactaccacatcaccattcaatatctgggtgactgagatgatttacctttctgccgttggcatggtcaacgcgctcggcaactcggctgatgaaatagcggcgaacctgatcgctggtgtggcccccgggatgcgccagcgtgcgggctggctacagggcttacccgaggccgtgctggggggcgtggagggtgaacttccccctgtccccgggtctttttctgcgcatcgcagccgcaacaaccagctgctgctggcggcgctggcgcaaatccggcccgccgtcgatgcggccattgcgcgcgtggggcgcgaccgcgtggcggttgtgctgggcaccagcacctccgggctggacgagggtgatgagtacgtacgccgcgcgcagaacggcgagagcagcccgcagtggcaatatccgcagcaggagctgggcgatccgtcgcgctttctcgcccgcaggcttgcgctggacggcccggcgtataccatctcaaccgcctgctcctccagcgcgcgggcgatcgtcagcggtcgtcgcctgattgacgccgggctggtggacgtcgccatcgtcggcggggccgacagcctgagccgcatgccggtcaacggcttcaacagcctggagtccttctccccgaccctgtgcgaaccgtttggccgccaccgtcgggggatcaccattggcgaagcggcggcactgatggtgctgacccgcgagccgggcgaggttgcgctcctgggcgcgggggaatccagcgatgcgtaccatatttccgccccgcatccgcagggcgaaggggcgatccgcgccatcaaccaagcgctgaacgaggcgggtatgacggcggcggacgtcggctatatcaacctgcacggcaccgctacgccgctgaacgatcgcattgaggcgcaggtgatccacgatctctttggcgaccgcgtgccgtgcagctccacgaaacatcttaccggccacacgctgggcgcagcggggatcaccgaggccgccctgagctggctgatcctgacccgagacctgccgctgccgccgcaggatttttcccgctacgcgccagacgacaccctgcccgccttcggcctgctgcaccagagcgcaccgctgaataaaccggcgatcctgtcaaactcctttgcgtttggcggcaacaacgccagccttctgctggggagggtatgatgcgctacttacctcccggggattatcttcctcacgacacgccgatgctgctgcttgagagcgtggaaaacgtcaccgatgaccgcgccgtttgcagcgtgacggtgaacgatcggggcgttctggctccgttcctggacgcggacggcaacctgcctggctggtttgcgctggagctgatggcccagaccgtgggcgtctggtctgaatggcaccggatgcaaaaagggctgccgcactgtgcgctgggcatggtgctgggcgcgcgcgagctggtgtgcgacgcagggcattttgccgcaggctgcacgctgaccatcaccatcgaacgtctgatgcaggatgaacgctttggcagcttcgagtgcgccattcatgcggataatgtctccctcgccacgggccgcgtgaacaccttccagccgagcgaggatgaattaaccacacttttcaaccagggaacaccatcatgagatccgtactggtcaccggcgccagcaaaggcattggccgcgctatcgcccttcagcttgcggcggacggttacaccgtcggcgtgcattaccatcgtgatgaagcgggcgcgcaggagacgctggaagcgattgtccaggcaggcggcgcgggccgtttactcaccttcgacgtgggcaaccgcgagcagtgccgcacggtgctggaacaggagatcgctgaccacggcgcgtggtatggcgtggtcagtaacgccggtattacccgcgacggtgcttttccggcgctcagcgacgatgactgggacagcgtgatccacaccaatctcgacagtttttataacgtcattcatccctgcattatgccgatgatcggcacccgcaagggcgggcggatcatcaccctgtcgtcggtgtcaggcattatgggcaaccgtgggcaggtgaactacagcgcggcgaaagccgggatcatcggcgccaccaaagcgctcgccaccgagctggcaaaacgcaaaatcaccgtcaactgcatcgcgccggggctgatcgataccggcatgatcgagatggacgaagccgcgctgcacgcggcgatgtcgatgatcccgatgcagcgtatgggccaggccgaggaggtcgccgggctggcgagttacctgatgtcggataaagcaggctatgtgacgcgtcaggtgatttcgattaacggaggcatgctatgacccgccgggtagtgattacgggcatgggcggcgtcaccgcgttcggcgaggactggccgaccatctcgcgccgtctgcgcgagtatgaaaatgcggtgcgtaccatgacggagtggcaggcgtatgacggcctgcaaaccctgctcgccgcgccgattgaagatttcactctccccgctcactatacccgtaagcgcattcgcgccatgggccgggtgtcgctgctctctacccgcgccaccgagctggcgctggagcaggcgggactgatcgacgacgcggtgctgaccaacggtcagaccggcatcgcctacggctcgtcgaccggcagcaccgggccggtcagcgagtttgcctctatgctcaccgaaaagcacacccacaacatcaccggcaccacctacgtgcagatgatgccgcacaccacggcggtgaataccgggctgttctttggcctgcgcggacgggtgatccccacctcgagcgcctgtacctctggcagccaggcgattggctacgcctgggaagcgattcgtcacggctaccagacggtgatggtggcaggcggcgcggaagagctgtgcccgtcggaagcggcggttttcgataccctgtttgccacaagccagcgtaacgacgcgccaaaaaccacgccgtcgccgtttgacgttcagcgcgatggcctggtgattggcgaaggggcgggcacgctggtgctggaagagctggatcacgccagagcgcgcggggcgacaatctatggcgagatcgtgggctttgccaccaactgcgatgcggcgcacatcacccagccccagcgtgaaaccatgcaggtgtgtatggcgcagtcgctggcgatggcgggccttggccctcaggagattggctacatttctgcccacggcacggcaaccgatcgcggggatatcgccgaaagtcaggcgaccgccgccattttcggcgacagcgtgcccatctcttccttaaagagttatttcggccataccctgggtgcctgcggcgcgctggaagccttgctgagtctgcacatgatgcgggagggttggttcacgccaacgctcaatttaagacaaccggatgagcaatgcggcgctttagattatattatgggggaaacccgcccgattgattgcgaatttattcagagcaataactttgcctttggcggcatcaatacctcgataatcattaaacgctgggcgtaactatgtaccagtttgtactgggaaagatctccacccttagcgcggacccgctggcgtcaacgctcgcagacatggcacctcagggtgcacgacacgcttcctggcttgcaggccggacgctgctcgccagaaccttatccccctcaccgcttcccgagataatttacggcgagcagggaaaaccggccttcgctaacggccatcctctgtggtttaacctgagccacagcggggacgacattgccctgctgatgagcgatgaaggtgaagtgggctgcgatatcgaagtgatccgcccgcgggagaactggcaggcgctggcgaatgccgttttcagcctcaccgaacatgacgagctggaacgtgaagcgccggaagagcagctttccgcattctggcgcatctggacgcgcaaagaggcaatcgtcaaacagcgtggcggcagcgcgtggcagattgtcagtattgacagcaccgcccagaccctcccggtcagtcagctacgcttcggctcgctgagcctggcggtctgtacccctacgcctttcaccttaacggcggaagcggttacttactccggtatttctgcggcataaaaatgaccaacacaccgagtataatcaagccgacgcccgccagcccgcgccaggaaaagtattctccccagccgggcagtaaaattgcagcactccacaccaggatgtaactgaggctcagcaaggcatacgctttgctgagcgccatacgatgcaatgccagataccagcagcccattgaggcgcaatagcctgtcagccccagcatcagcgcgcccgtaccgggggctatatgccagagggctgcccagaaagcgtcgctcatcgggggcagcgtcaccattgcatgacgcagcagcagctgcgccacgctgactaacactacgctgcataacgcccaacacgcaccgttcacaggcttcctcccagcaaaataaccccgacgataatcaacccgacgcccagccagtgacgtagcgggacaggctcatgccagacgatttttgccgccagcgttacccagacaaagttaaggctcagcatggggtacgccaccccgacgggtagatgctgcaataccaccagccaggcaaccatcccgccacccagcatcagcagggccagcccaagccacagggcgacctgctgaccgccgcctgcccgggtcgcctgtttctggcacagttgacctgcgcagctcaacaggcttgccagcaccagccagatccaggccatcactgcggcagatattgcaggtaagccagacgcccctgaatcgtcaggttgtccggttttggcagcccggcgcgggccaggtcgtcgtttttcgacagcaggatcaccagcgacaccggtccctgctgacgatgcgcttcaagccagtgcgcgatatcatctttgctcacaaaacgccccttagcgtccggataatccaggccgtatttcagctcaccgctctgcccatacaaaatgatgtcattacgctgaagctcccacgccagcccggaggctataccaacgttgttcgccaggacgaatttactcatctgcaatggctcgcgaacggaatccaccagcgactgcggctgtttggaatccactacccggtccgggatcgcaaaacccaccagcagggccagcccggcagggcaaagcgccgccagccaccagcgctgcggatttttaagggtaaaccagcccaccgaggcccagaccagaaacgccaccacggcacagaagactttgtacaattcgaccggtgtccagaccggatgtttagcaagcccccatggcgataccaccagcgccgccagcatgccaagcacgccaaacgcgatattgatcccaccgttaatacgtaacgctttttcggcgacggtgcaggcgtagcgcgccatcaggatcgccagcggcgcaaagcacggcaggatataggtcggcagcttgcctttggcgatgctgaagaacagcagcggcatcactatccagcccagcagataaagccccgccctctcgttttctctgtctcgccatcccaggcgcagcgagcccggcagcatcgccagccacggcagacttcccgcgatgaggaacggcagatagtaccagaacggcgctttatgctgggcatcgctccgggcaaagcgctggatatgctccacccagaagaagtaacgccagaaatcgggttcacgctgagcgattgccagcccccagggcaggacgataagtacgcagctgaggatcgccagccagccgaaaaccagcacctccttccagcgtcgttgcgcaatcacccacggcagcacgccaatcaccggtaccgccagcgccaggaagcctttggtcatgacgcccatgccgcaggccagccccagcagaatgtagccccccgcttttccggctatcgttttcgcctgcgaagccagccagaagctgcacatagccgccaccagccagagggtgataatgggatccagcacggcgtaggtgccgatgccatagaccaggaacagggttaagaagatcaggccggagaagatcgccacccgcttatcctgccagagacgccaggccagccagatcaccagcagcgccgtcagcccggtgcagaatatcgcccccgcgcgaacggcaaaattggtgtgtccaaatagccattgcccgatgctgttcacccagtaaccggcaatgggtttttcaaagtaacgcagcccgaggaaatgcgggaccacccaatcgccggaggccagcatttcgcggctgatttccgcatagcgcgtctcatctggctgccataacaggcgaaggttgaccggaaggaggtagtaaacgacaaacagtgcgagaagcgtcaggccatagcgggctgttttcatagtgccgggctcacggtttgttgatagccaagccagccttcccggccagccatttcacgacggacgatttttcccaggggcagcgtgccaggatcgtccggcaacagctggcttaacgggcagaactgaatgccctcctgcgccgccagcgcaagcaacgcgtcgaaatcctgctgatacgcaatgccttccacttcggcatggatggtataaaccggcgtaccggcatcgcggtgcatcgcatccagaatgtaacggttaaacctgtcggcactcacctcgcgcccgaccacttcatcccacgtcggaagagtgaccggaatctgcaccgtgccggttcggttttcccccagcagcggtaaaaacggtccggtgccccggcaatcgctgttgtagcgaaaggcaaagtgttctttggccttcaccacgcgctggtcggcccgccatcccgccacggcggaacagcgcacaggctggccggtaatggcttccagctccagcacgccgcgctcaacctcacgcgccaggcgggggatatcccacacgcccgcccaggcctgccaggcatggtgatcccaggcgtgcagccccacttcatgatgctgcgcggccttgcagatgatcgcttcattttccgcgccgatgcgcctgccgggccatgcggttccggccagcaggatatcccagccgtagagcgatgccgcgcgcgagcgcagcattttgtacagaaaggccggtttaaccaggcgccacaggtgacgccccatattgtctggcccgacgctgaagaaaagcgtcgcgcgcacgttgtgtttgctcagcagttccagcagccgcggcacaccctcgcacgtgccgcgaaaggtgtcgacgtcaatgcgtaaaccgacctttttcatgatgcctgttccgacagctccacggtgcgcaggaagaagtcgagcgtttcatcaatggtctgctccatcttcaccgtcggcgtccagttcaggcagcgcttcgcattgcggatgctcggcttgcggtgctcaacgtcctgataacccttgccgtagtagctgctgctctccacttcgcggaaaccggcaaacggcgggaactggctgcgcagcgggtgacgttcaaagcttgccagcagcatttccgccagctcgcggatgctcgcttcgttgtccgggttaccgatgttgatgatctctccgttacagcggccgtctttgttttcgatgatgcggaacagcgcttcaataccgtcgctgatatcggtgaagcaacgtttctgtttgccaccttcaatcagcttaatgggcgaaccttccaccaggttgaggatcagctgggtgatagcgcgggagctgccgatacgcgcggcgttcaggttgtccaggcgcggccccatccagttaaacgggcggaacagggtaaagcgtagcccctctttctcaccgtatgcccagatcacgcggtccagcagctgtttggagacggagtagatccagcgctgcttgttaatcggcccgaccaccagactggaggtgtcttcatcgaagttattgtcggtacacatgccgtacacttccgacgtcgacgggaagatgatgcgcttatcgtatttcacgcagtcgcggataatcttcaggttctcttcgaaatcgagttcgaacacgcgcagcgggttacgggtgtattcaatcggggtggcaatcgccaccagcggcagcaccacgtcacattttttgatgtggtactcgatccattcggaatggatgctgatgtccccttcaacgaagtggaaacggggattagtgaggaatcgaccgatcgcatcggatccgatatcgagaccgtagatctcgtaattgtcgtcttccagcagccgttcggtcagatggttaccgataaacccgttcacgccgaggattaagacgcgcgtgcggcgtttgatcgccaccaccggcgcgctggtgatcagcgcccccgccaccagcccaagagactgcgccagctgcgccccctgcacgtacagcccgttatccgtttgtccggtgacgatctccagcgcctgctcgccgcagctcacaatcagcggagagacggagatgacggtgcccggttttgccgccggaatgtcctcacgcacgcgggatttccagacgataaatttactgaccccggcgaagctgtacgcgcccggccacgggtcggtcacggcgcgcaccaggttatgcagctgacgcgccggtttcgcccagtccagtcgcccgtcctccggcgtgcggcgaccaaaactgcttgccttgctttcgtcctgcgcggtttcggtaaaagtcccctgacggatcgtcggcagcgcgtcgcgaagcaggctttgcgcggcgatgcagagcttgtggtgcagctccagcgccgtttcatcagcgccaatgcccactttcagctgtgccacgataccgcccgcatcggcacgtcgtaccattttgtgcagcgttacgccggtttccgtttcaccgttaaccagcgcccagttcagcggcgcacggccacggtaggcaggcagcagcgagccgtgcaggttaaatgcgccttttgtcgccacgctcaggatgtcgtcgcaaagcagattgcggtagtagaaagagaaaatcacgtccggcgcaagcttctgaatacgatccacccacagcggatggttcacatcgtccggggcgtaaaccggaataccgtgttcagccgcaatacgcgccaccgagccgaagaagtggttttccccggcaacatccggatgggtgaagatggcggtaatgtcgaagcctgcgtccagcaaggcttgcgtgcccgtgcaacccatatcgtgataggcaaagacgacggttttcatgggtggttttcctcttgagatgccaggtgctcctgacggacaacacgttgaataaaatagcgcggacgcgcgcgaacatcgttgtaaatacggccaatgtactcacccagcagacccataccgatgaactgggcgccaatgaacgtgaacagcacggcaaacagcataaagaccccttccgccgcccactggggaccaaagaccagccgcagaacgaccagcagaacggaaagcgcaaacccggccagcgcgataacgctgccgaacacgctcagcaggcgcagcggcgtggtggtcaggcaggtgatcaggtcgtacatcaggttgatgagacgcatgaagctgtattttgactccccgtgctcgcgctcggcgtgcagcaccgggatctccgtcgctttacgggcaaaggtgttcgccagaatcggaatgaaggtgctgcgctcgtggcagtgcagcatggcgtcgacgatgtggcggcgataggcgcgcagcatgcagccgtagtcgcccatcgctttaccggtggtgcgctggatcagacggttgatggtgcgagacgccagcttacggaacaggctgtcctggcggttttgccgcacggtgccgaccacgtcgtagccctcgtcggctttggcaaccaggcgtgggatctcttccggcgggttttgcagatcagcatccagggtaatcaccagatcgcccgtaacgtggctgaacccggccataattgccgagtgctggccgtagttacggttgagcagtacggcaacaatgtggctgccctccgcctgcgcggcgtcggtcagcatccgcgcggaattgtcgctgctgccgtcgtccaccagcagaatttcataagctttgccgagcgtctcgcaggcggcagtcgtgcggcggatcagttccggcaggctctcctgctcgttatagaccgggatcaccacggaaactttttgtacaggcggcgcactgaacatatcaatgtcctgcaagctgatggagcgcggtaatgacgcgggttgtgtcgtcatgggtcatgtccgggaaaagggggagagaacaaatgcacgcgctgttccattcagagttcggaagcgacacatcagggaaacgctcgcggtagtatttttgcgtatgtgccgcacggaaatgcaggcccgtaccgatgccctgctccttcagcgcggccatcagggcatcacgcgagaggccgcaccgggcctcatccacgcgaatgataaacaggtgccaggcgtgcagatgcggccaggacggaatgcgcagcggctggaaaggggtatccgagagttcaagcaggtagcggtcggcaatgtcgcgacggcgcctgttggcttcgcccagcttgccgagctgcaccagcgccagcgcggcgttgatatccgcgaggttgtatttaaaacccggggtgatgacctcggcctgcggcgcgcggccatgggtctggcggtcataggcatcaacgcccagaccgtggaacttcaggctacggatgttttgcgccagctgctcgtcatccgtcaccaccagcccaccttcggcgcaggtcatgtttttgatggcgtggaaggagaatattgcggtgccccgccagcctacatgacggctgtggtagtacgttccggcggcatgggccgcgtcttcaatgacaggaataccgtgacgttcaccgacggcgcggatggcgtcaatatcgcacggcgcgcccgcataatgcaccggcacaatggctttcgtgcggggcgtaatggcggcgtcgaccgcttcaggcgtcaccatcagcgtgtctctgtcgacgtcgatcatcaccggtatggcacccagcagcacgatcatattcagcgtcgatacccaggtcagggagggcgtaatcacctcatcgccgggaccaatccccatcgccatcagggtgacgtgcatccccgccgtggcagaggagacggcaatcgcatgacggtttcccgtcagcgtacagaacgcctcttcaagcatctgatttttcggcccggtggtgatccagccggaggttactacctcctgtaccgcggcgatttcctccgcgcccattgagggccgggaaaaaggcaaaaaatcacgcattattaatttccttgagttatgcatggcaactttttgatattaaccaaatgccgatgcgtttatttcaacgaaccataaactcatctcaaggtaacgttcatttcttagggaaaaattaagatggtgataaaaaggaggggtgaattgatataaattcattattaaacaataggttaagtaattatgaattatttattatgtgattccgctcaccgtattaaagtcaattatctaaaccaaacatcaacaaataaaaaaatccccgaccatttccaataaatatgaaataagtcgggaacttttctttttagttaattgtcgcgcttattttaaattatcaggaaagttttttggcaactcgctggccgcgcacgcaataacgctatcgtcattcgcaccgcagtcgcgcacgaaggtgatggtggcaaattcatcaatcacttcggttggatacgctggcccggcatcacggtagctattcatcagtggaatgtgatcgttctggaagcagacggttttttccggattattcatgacccagcgcgggaagaagatggtgccgtggaacaggctgtcgcccaggttcacgatcaggctcacgtcggtaccggttggctccgtccaggaaattttatagatgctctccccaacgcgaacaatgtaggccagctgatcttttacccaacggttgcccaccagaccgctgtgaatacggtagtccagggtgttttcgtttttaacgtaaatttcgtagttccagccattatcgtaggtatataccagatgtttgccgacgaagccgcttaaatcatgtttatcgaaggtgctcatacgatgtctcctttgttttgatgagacgatcgtaccccttcaaaaaatgaatgaataacgctatgtttgaatcaaattcatccaaaatttagattaattatgcacaagacgacgctcgaacagtgggccttgctggagagagtcatcgaggctggcagcttcgctaaggcggcggaagagacccaccgcagccagtcctcggtcagctataacctgtcgctgttgcaggagcggctgggcgtggcgctcctgatgacagagggacggcgtgccgtgctgacaccggcgggtgagctgttgctgaatcaggttaaaccgctgctgaaagccttcgcctatgttgaaacgcgcgctgcgaccctgcgcagcgggatgcgaacccgtatcgacctgatggtagacagtatttttccgcgcagccggctgttcgcgattttgcgccagtttcagcagctgtacccgcaaacgcaggtgcggcttaccgaggtgctggaaaacagccgcgcggatgcgctcaatgatgaagccgacgtgatggtcttaacccgccgccaggacattaccggcctgggcgaatggctgatgaatatcgattttgttgccgtcgcgcatcacgctcacccgctgtttgcgctggatacaccgcttaacgacgagatgctacgaccgtggccgcgcattcagatcgcagacagccagcccaccgctaacccttccggggagtcgtggaccttctccaccatcgatgccgcgatcgaagcggtgttgtatcaggttggatacggctggttaccggaagaacgcattcagaccccgctccagcagggcatccttaaaacgctgccgctcagccacggcgtacgtcgcgccacgccgctgcacctcatcgtcaaacactccctcagcccgctggacgagcaggttgagacgctgttgcgcctttttaaacaggagccgtcatcgtcaagtgctacgctttaagttttgaaccataagatgacaaggagcgaatgatgaaaattgatttaacggggaaagtagcgctggtgaccgcgtccaccggcggtattgggtttgccatcgcccgcgggctggcggagagcggtgcggaagtgatcgtgaacgggcgcagcgtcgactcggtgaacaaaggcattcaggcgctacagcaggtggtgccgggcgtacaggtccgtgccgccatagccgatctaagctcgcaggagggcgttgacgaactgctcagggtcgcctcgcacgtcgatattctggtgaataacgccgggatctatggccagcaggatttttattccaccgacgacgagacctgggaacgctactggcagaccaacgtgatgtccggcgtgcgcctctctcgtgccctgctgcccggcatggtacaaaagggctggggtcgggtagtgtttatctcgtcggaatcggcatgcaatattcctgcggatatgatccactatggcgtgacaaaaaccgcccagctctcgctggcgcgcggtctggcgaagttcgtggcaggcagtggcgtgacggtgaacagcgtgctgccgggcccgacaatgtcggacggttttgccgcgatgatgaaagacgagatcgaaagaaccggtaaatcgctggaacagctggcgaaagagttcgtgatggcgaatcgccccagctcggtgatccagcgcgccgccacggtggaagaagtggcaaatatggtggtatatgtctgttccatgcaggcctccgcgacttccggcgcggcgctgcgcgttgacggcggcgtggtggatgacattgtttgacccgtcaggccacaggttcaggaaaaaatgcgacctgatataaggactgtgaaggtaaagcaggtaaactagtgaacagaatgtgtatttcagctaagacgtatttatgaccaatatgattgccgacgaagccgtggcgaagtccagcgtgctctctgtctttgactttgatggtacgttgacgcaccacgacagttttatcccgttcctgcgctttgcctttggcaagcgctactttgctggccgactggtgcgcatggccctgcctacgctgcactgtgtgcgccgcaagctgacgcgagatgagctgaaagaggtgttgatcaaaaccttcctgacgggggtggatgagcactggttacgtcagcaggcggaagccttctgtgaaaaatactggaacaagctgatgcgcccggaaggtgtgctggccgtcgccaacgaggtcaattccggtgcggaagtgacgatttgctctgcttccccggcgctggtattgcagccgtgggccgataagctcggcattaagctgattggcacgcagctggaagtgaaagacggcaagctgaccgggcggatcaccggccacaactgccgttgtgcccagaaggtggcgaggctggagaaggtgtatggggatttgaacgcgtatcacctgcgcgcctggggcgacacgcgtggcgaccacgagttgctggcggcggcgcaggatccgcactggcggcattttcatcatccgagcaagcgccgaaattcaccaattaagggttaggtgcggcccggtgccctcaccccggccctctcccacagggagagggagaaaagcggtacatcaggcctcacgttttcccgggaacatcacgctcgcaataatccccagcgccagtacccccagcaccacaaacaggcttgccgtggcgccgatgttataaccgtgatgccagaagtggtcggtcgcattcagccccagcttgaacgccacgaagaacagcagtaacaccaccgctttctccagatgcaccagatactgcttcagcgcttccagcacgaagtagagggtacgcaggccgaggatcgcgaacatcatggcgctgtagatgatcagcggctcacggctgacggcgatgattgcgggtacggaatcgaaggcgaacatcacgtcggacagctccaccaccgcgacgcagagcagcagcggcgtcgcgtagcgcttcgccttcttcacgcggcctaccatcacatccttgttttcaggcttctccagttcggcatccacctctttctgggtcaggataaacgcatggctgctgatttttggccacaccgggtagaagcgtttcaccaggcggtacgccagatggttggagtaatcttctacttcatcgctctcttcattgcgtttcagcatcatcaccgccgtccagccgacgaccagcgcaaaaatgacctcaacatacggtcccaggctcagcaggctggtgccaatggcaacaaaaataccacggaacacaatcgccccgagcacgccccagtagagcacgcggtgacgatatctatccggcacgccaaaccaggcgaagatcgccatcatcacaaacaggttgtcgacggagagcacctcttccagcgcatagccggtcaggaacagactggccatctccgcgccgtggtgcacgtataagaatccggcgaaggccatcgccatcatgacccagaagatggaccacatgaccgcgcttttcagcgagatcggtttatcgtgacggtgcatgaagaggtcgataaacatcgccccaacggccatcaccacgaagacaacaacggtttccgtcgggaaaccgagatgagcagcagacatagacaacccttttaagaagacaaaacaccatgcacacaataaaaagcgtggacccgttaaggacgcagcacgctaaaaaaataaatattaaccgttcttttcagcgagtgcctgcgcgcatgcccaggcactggcccacgcccactggaagttatacccgccgagccagccggtcacgtccatcacttcaccaatgaaataaagacccggcacgttgcgggcttccatcgtgcgggatgagagttcgtttgtatccacgccgcccagcgtcacttccgccgtgcggtagccttcggtgccgtttggctgtacgcgccagttcgtcagcgtctccaccagcgcttcctgttcgcggctgttgagctgcttgagcgcgacatccggaatttgccctaatacctgcaagcactccacgagacgcttcggcagctgcatcgccagggtatttttcaggctttgattcggatgcgcggcgcgttgctcgttaaggaaggcgtccagatcgcagtccggcaccaggtttacggagacaaactcccccggctgccagtagctggagatctgcaataccgccgggcccgagagtccgcgatgagtaaagagcagattttcgcggaacaccgtgccgtcttcggccgtaatgaccgacggcacagacacgccggagagcgtctgaagctgttccagcagcggcttatgcagcgtgaacggtaccagcccggcgcgggtgggcagtaccttcaggccaaactgctcggcaattttatagccgaacggtgaagcgcccagccccggcatcgagaggccgccgctggcgatcaccaggttatcggcgctgacggtttcaccgttgagttgcagcgtgtagccctgctcgtcacgggcgacgtccagcacttcggtgcgcaggcgcataactacgccgcctttctcgcactcggccaccagcatatcgacaatttgctgcgcggagtcgtcgcagaacagctgccccagcgtcttctcatgccacgcgataccgtgtttacccaccagctcgataaaatcccactgggtgtagcgcgccagcgcagatttgcaaaaatgacggttctggctcaaataggccgcaggctcgacataaagattagtaaagttgcatcgcccgccgccagacatcaggatcttgcggccaggcttttttccgttatccagcagcagcacgcgacgacccgcttgtccggccatcgccgcacaaaacatacccgccgcaccggcgccaattactacggcatcaaacctttccacgtcaaaatcctcttcgttaactgccgcggattgtaaagtttcctcagtggtcgcaccagcgtaaaaagatattacaaagccatttcattgatatttaaagattatcctttcaggcacatttctcaaatcaggtggtatgtcaaaaaaagtctatatttcactttgcccgttgcgcatttgtcctggataatgcgccgcgttcatgtcctcaaaatggcgtaacgtcctatgctacatttgtttgccggcctggatttacataccgggcttttattattgcttgctctggtttttgtgctgttttacgaagcgatcaacggcttccacgacactgcaaacgcagtagcaacggttatctacactcgcgcaatgcgatcgcagcttgcggtcgtgatggcggcggtatttaacttttttggtgtcctcctgggcggactgagcgttgcgtatgccattgtgcatatgctgccaacggatctgctgcttaacgtgagttccggtcatggcctggccatggtgttctcaatgctgcttgctgcgattatctggaacctcggtacctggtatttcggcctgccggcatccagctctcacaccctcatcggcgcgattatcggtattgggttaaccaatgccctgatgaccgggacctccgtcgttgatgcgctgaatatcccgaaagttctcggtattttcggctctctgatcatctcccctatcgtcggtctggtggtggcgggtggcttgattttcatcctgcgtcgctactggagcaacacaaaaaaacgtgcgcgtatccatctgacgccagcagagcgtgagaagaaagacggcaagaaaaagccgccgttctggacgcgtatcgcgctgatcatttccgctattggcgtcgccttctctcatggcgcgaacgatggtcagaaaggtatcggcctggtgatgctggttctgattggcgtcgcaccggcgggcttcgtggttaacatgaacgcctccggttacgaaatcacccgtacccgtgatgcggtaaacaacgttgagacttacttccagcagcatcctgatttgctgaagaaagcgaccggcgtggaccagctgattccttctccggagtcaggcgcaacgacggcaccgggcgagttccattgccatccggcaaacgcgattaacgcgctggaacgtgcgaaaggcatgctggccgatatcgaaagctatgacaaactggctgttgaacagcgtggtcaactgcgtcgcatcatgctctgtatctccgacgtgaccgataaagtcgcgaagctgccagaggttaatgctgacgaccaacgtctgctgaagaaactgaaaggcgatatgctcaacaccattgagtacgcgccaatctggatcatcatggcggtcgcactggcgctgggtatcggtacgatgattggctggcgtcgtgtggcgaccaccatcggtgagaagatcggtaagaaaggcatgacctatgcgcagggtatgtccgcgcagatgacggcagcggtatctatcggtctggcgagctacaccggtatgccagtctccaccacccacgtactctcttcgtccgtggcaggtaccatgattgttgacggcggcggtttgcagcgtaaaaccgtgaccaacattctgatggcctgggtgttcaccctcccggcgtccatcctgctgtctggcggtctgtactggatttcgctgaagctgatttaatcggctgaaggcgacaaaaaagcgggtcaggaaactggcccgctttttttatgctcagtgccaaatcatgagcgcaatcatactcaccacaaccagaccacacagggcgctggtcaaaatgaactgacgacgcaggcgctcgcagcgacggataaactcttcatcgtggtgatcgcggtagcgttggtagtagatataccccaccagacgcatctgcttgctgggctgtccgtgcgaggtgaagaaccctccaccgtccacatactgataaagcaacggatcgcaaccacgaagtaccactaacagcgcacgtaacgatgagaagtagcgcgccatattcactatgcaaaccacgcataacgcccaaaacaatgcgacggtgctaatcatacatcctccccggcgtccgcccacgaagcaaggctcctgagctaccgcaccccaatgccctgacagacagttcagtgaaagaatgaccaaaagtcgatccggttcgcgttttaatatccgaacggctcattaaatagtgtaggagatccgttaatttttttgccacaaggttaatcgttatcaacaccaaagcttgaaaaatatgtttaactgggccgtaatgaaagcatcagacgacggctttcccatttagtcatcgataacttaaggaaggagtaacactatggcttacaaacacattctcatcgcggtagacctctccccggagagtaaagtgctggttgataaagcagtatccatggcacgtccctacaacgcgaaagtttcgctgattcacgttgatgtgaattactccgacctctacaccggtctgatcgacgtgaatctcggcgatatgcagaaacgcatctccgaagagactcaccacgcgctgagcgagctttctaccaacgcgggctatccaatcactgaaaccttaagcggtagcggcgatctgggccaggtgctggttgatgcgattaagaaatacgatatggacctggtggtatgcggtcatcaccaggacttctggagcaagctgatgtcttccgcgcgccagctgattaacaccgtacacgtggatatgctgattgttccactgcgtgacgaagaagacgagtaagtgcaaaaaagcccggtggcgctaacgcttaccgggcctacaaggtaaaagcaaaacggcaacacggttgccgtttttaatgtttgttccctctccctgtgggagagggttagggtgagggcatcagcccgcactattctggcgttcccgaataaatatcaaatcggtgtcctttggtggtcaccgcgttagtggtcgcaacgtccgccagcggcggcgcatagtccggccgcttcaccaccacccgcttcgtcgccagctgacgagccggctccagcaggccatcggcatctaaatctggccccaccagagactgaaacacccgcatctctttcttcaccagcgcgcttttctgcttatgcgggaacatggggtcgagatagaccacctgcgggcgcggggtgatatcggtcagcgccgtcaggctggaggcatgaataagttgcaaacgttcctgtaaccacgggccgatttccgggtccgcgtagccccgcgtcagcccgtcgtcgagcagcgcggcgacaactggattacgctccagcatccgcacccgacagccgacagacgccagcacaaaggcatcgcgccccagccccgccgtggcatccaccacgtccggcagatagctgcctttaatgccgaccgctttggccaccgcttcaccgcgaccgccgccaaacttacgccggtgcgccatcgcgccgccgacaaaatcgacaaaaatcccgccaagctttggctcatcgagcttgcgcagctccagatgttccggcgtcatcaccagcgccatcaggttgtcttcatcatgttccagcccccagcgggccgccagaacagataaggcgccgtccccggcgcctgtttcatctactaagcagatcttcacgtagcaatcagcctttgattccgtaatgctccagcatcgcatccagctgcggctcgcggccacggaagcgtttgaacagctccataggctcttctgaaccgccgcgcgtcaggatgttatcaaggaacgactgaccggtttcgcggttgaaaatcccctcttcttcgaagcgcgagaaggcatccgccgccagcacgtcggcccacaggtagctgtagtagcctgcggcgtacccgcctgcgaagatatggctgaacgcgtgcgggaagcgtccccaggtcgggcctggaataaccgcgacctgctttttaatctcagccagggtttcgaggattttcgccccctgctccgggctgaactcggcgtgcaggcggaagtcgaacaggccgaactccagctgacgcaggatgaacatcgccgcctggtagtttttcgccgccagcattttatccagcagttctttcggcagcggttcgcccgtttcgtaatggccggagataaatgccagcgcgtccggctcccagcaccagttttccataaactggcttggcagctcgaccgcatcccatggcacaccgctgataccggcgacgccagcggtttcgatgcgggtcagcatgtggtgcaggccgtgaccgaactcgtggaacagggtgatcacttcatcgtgggtaaacagcgcaggtttgctgctcaccgggcggttgaagttacaggtcaggtaggcgaccggtttttgcagggaaccatccgctttacgcatctggcccacgcagtcgtccatccacgccccgccacgtttgttttcacgcgcgtaaagatccagatagaagctgccgcgcagctcgtttttctcgtcatacagctcgaagaagcgcacgtccggatgccagacgtcgatgtcggtacgctctttcgcggtaatgccgtagatgcgtttcaccacctcgaacaggccgttaacggctttgttttccgggaagtacggacgcagctgttcgtcgctgatgctgtagaggtgctgtttctgtttttcgctgtagtacgcgatatcccacggctgaagctcgtccacgctgaactccactttcgcaaaggcgcgcagctgagccagttctttttcaccctgaggacgggcgcgtttcgccagatcggtcaggaagtcgagcacctgctgtgggttctcggccattttggtggcgagggatttatccgcgtagctgtcgaagcccagcagctgtgccagttcgtggcgcagggcgaggatctccgccatcaccgggctgttatcccacttaccggcattcggcccctgatcggaggcgcgggtgctgtaggcgcggtacatctcttcgcgcagggcctggttgtcgcagtaggtcatcaccggcagatagcttgggatatccagcgttaacaggaagccttcctgctctttcgcttcggcctgggcttttgccgccgccagcgcgctttccggcatacccgccagttcagattcatcggtaatcagcttcgtccagcccatggtggcgtcgaggacgttgttgctgtactggttgcccagctcggacaggcgcgcggcgatttcgccgtagcgaacctgtttttcttttggcaggccaatcccggacagttcgaaatcacgcagggcgttatcgaccgattttttctgcgccgtgttcagttcggcatagtggtcgccgtcgcgcaggtcgcggtaggctttgtagagcccctcatgctgaccgacccaggtgctgtactcagagagcagcggcagggtctgttcgtaggcttcacgcagctccgggctgtttttcaccgagttcaggtgactcaccggggagaaaatacgccccagcacgtcgtccacttcggccagcggctgacacagattctcccaggtgtacggcgcgccctgcgcgaccacgctttctaccgccgcacggcagttgttcagcgactgggtaacggccggaaccacatgctcagggaggattttagaaaacggtggcaacgaaaaaggcgtcagtaatggattggtcataaacgctgtcctgttgaaatagatgaatgaagcgcgcatccggcgctgtgcatattgttttcagtaatggggttaagtgtagaggatttcaatgccgaaggttgtcgaaaaacgccctgtggcgctgcgcttaccgggcctgcgggtaatctgtgccgttctgctgtaaactgtggcaaatcgtcaattcagcggaatatcattacccatgctcagttatcgccacagcttccacgcaggcaaccacgccgacgtcctcaaacataccgttcagagcctgatcatcgaatcgcttaaagaaaaggataaaccgttcctttatctggacacccacgcgggcgcgggccgttatcagctgagcggcgagcatgccgagcgtaccggtgaatatctggaagggattgcgcgtatctggcagcaggacgatctgcctgccgagctggagccgtacattggcgtggtgaatcacttcaaccgcaacggccagctgcgttactacccgggttcaccactgattgcccgccagctgctgcgcgagcaggacagccttcagctgacagagctgcacccgagcgacttcccgctgctgcgttctgaatttcagaaagataaccgcgcccgcgtggacaaagccgatggctaccagcagctgaaagccaaactgccgccggtttcccgtcgcggcctggtgctgatcgacccgccgtacgaaatcaaaaccgactatcaggcggtggtgaccggcattaacgaaggttacaaacgctttgcgaccggcacctatgccctgtggtatccggtagtgctgcgcgcgcaaattaaacgcatgatcaaagacctcgaagcgaccggcattcgtaaaatcctgcaaattgagctggcggtgcgccctgacagcgaccagcgcggcatgaccgcgtccggcatgatcgtcattaacccgccgtggaagctcgaagcgcagatgaacaacgtgctgccgtggctgcacaaaacgctggtgccagccggtacgggtcacgccaccgtgagctggatcgtaccggagtaatcgcagccatcggtggaaactattgatttcaggtatacaatcgcggcaattcacgattaaggacaacgctatgactaagcattatgactacatcgcaatcggcggcggcagcggcggcatcgcctccatcaaccgtgcggccatgtacggccagaagtgtgcgctgattgaagccaaagaactcggcggcacctgcgtgaacgtgggttgtgtaccgaagaaagtgatgtggcatgccgcgcaaatccgtgaagctatccatatgtatggtccggactacggctttgataccaccatcaaccacttcgactgggataaactgatcgccagccgtaccgcctacatcgaccgtattcacacctcgtacgataacgtgctgggcaagaataacgtcgacgtgatccgcggcttcgcccgtttcgtggatgcgaagacgatcgaagtgaacggcgagacgatcaccgccgatcacatcctgatcgccaccggcggccgtccgagccacccgaacattccgggcgcggaatacggtatcgactccgacggtttcttcgagctgcctgctctgccagaacgcgttgccattgtgggcgcaggttacatcgcggttgagctggccggcgtgattaacggcctgggagcggaagcgcacctgttcgtgcgtaaacacgcgccgctgcgcagctttgacccgctgatcgtcgacacgctggtcgaggtgatgaacgccgaaggcccaaccctgcacaccaacgccgtgccaaaagcggtggtgaaaaatgcggacggtagcctgactctggagctggaagatggccgcagccagaccgttgattgcctgatctgggcgattggtcgtgaaccggccaccgacaacttcaacctggccacaaccggggtggaaaccaatgaaaaaggctacattgtcgttgataagttccagaacaccagcgtaccgggcatttatgccgtcggtgataacaccggcgccatagagctgacgccggttgccgtggcggcggggcgtcgtctttccgagcgtctgtttaataacaagccggacgaacatctggactacagcaacatcccgaccgtggtcttcagccacccgccaatcggtaccgtcggcttaaccgagccgcaggcgcgtgagcagtacggcgatgaccaggtgaaagtgtataaatcggcgtttaccgcgatgtataccgcggtcacctcgcaccgtcagccatgccgcatgaagctggtctgcgtgggcccggaggagaagatcgtcggcatccacggcattggtttcggcatggacgagatcctgcaaggcttcgcggtggcactgaagatgggcgcaacgaagaaagacttcgataacaccgtggcgatccacccgactgcggcggaagagtttgtgactatgcgctgatccgtctgatccgcaacaaaaccggccagctggccggtttttttatgccctgggcaggtaaacccaacggctgtacaaacggtaacaaaataacccggtacccgcggtggaattaactaatcttagaaagcgctacgcgttcgcctgttactacggaaaaagattagagatatgaaaatgcacgtaaagatcaccgcaaaactgatggccaaaatgcaccttgtactcgcgctggtatgggcgatactgactattcctaccctgctgtggtggaaaaacagcattctgtgggtgtcgttaatgagcatttacgccatcgtgatttcccatctggctgcgtacagcgccgcccatgcggaaaaagcggccagcaaagcgatggataaaagcgaaggcgccagccagaaagccaatcaaaccgccaacagccttcagggcgatgcgcgtcaggcacattaatccgtgcttatatgcagaataccgaatgctctgaattttattcctgctctgtttccaaagattctgatttaataatttcataatcaaagggatatctgactttcagcgtgtttaaatccattttgaaagcgtgatctaccgcacacttcgcaccgcattaaccgaagcgaatgtctacgctttaaagatagccgggaaaaacccgtattggttacgacaaaaaccggaggtcctgaacaccatgttcaaccagaaactacagactgccgaggatatcgagttcgagattgcagaagagctgcgctacgaaaccgatccctgtgagttaaaactggatgagatgatcgaggcagagccggaaccggaaatgattgaagggctgccggcgtccgatgcccttacgcccgcagaccgctaccttgaactgtttgaacacgtccagtcgtcgcggctgtttgcggacagcaaaacctttcccgactgcgcgccgaagatggatccgctggatattttgatccgctatcgcaaggtgcgtcgtcaccgtgattttgacctggcgcgctttgtggagaatcacttctggctgccggaggactacagcaaagagtacgtctctgaccccggcctgtctctgaaagaacatattgataatctgtggccggtgctgacgcgcgagccgcaggatcacatcccttggtcgtcgctgctagcgctgcctcaggcctatattgtgcccggtgggcgattcagtgagacctactactgggactcttacttctccatgctggggcttgctgaaagcggtcgtaacgatctgctgaaatgtatggccgataacttcgcctggctgattgagcgctacggccatatcccgaacggcaaccgtacctactatctcagccgctcccagccgcccgtttttgccctgatggtggagctgtttgaagaggacggcgtgcgcggggcgaagcgctatcttgagcatcttaagatggagtacgccttctggatggacggggcggaatcgctgctgctcaatcaggcctatcgcagtgcggttcgcatgccggatggctcattgctcaaccgctactgggacgatcgcgacacgccgcgagatgaatcgtggattgaggacgtggaaaccgcccgtcattccggtcgtccgccgaacgaggtgtatcgcgacctgcgcgccggggcagcctcaggatgggattactcatcccgctggctgcgcgatcctgcgcggctggccagcatccgcacgacacaatttatccccattgatttgaacgcattcctgttcaaactggagagcgctatcgccaatatctccgcgtcgaaaggggataaagagacggctgatctgttccgccagaaagccagcgaccggcgcgcggcggtgaaccgctatctgtgggacgaagagaacggctgttatcgtgattacgactggcggcgtgaagccctggcgctgttctctgcggccagcattgtgccgctgtatgtgggcatggcgacgcatgagcaggctgaacggctgtccgatgccgttaaagcccgtctgctcacgccgggcggtattctcgccaccgaatatgaaaccggggagcagtgggataagccgaacggctgggcgccgctccagtggatggcgatccaggggttcaagcagtacggcaacgactcgctgggagatgagatcgcctggagctggctgcacacggtgaaccattactacaaaacccatcataagctgattgagaagtaccacatcgccagcagcacgccacgcgaaggtggcgggggtgagtatccgttgcaggatggcttcggctggacgaatggcgtggtgcggcggttgatagggctgtatggggagccctgagcctcacccctctcccctgagggccggggtgagggggaaaaataatcagcggatcacctcataaatggcagtctggatggactgccatttttttgtgctggcattgggctgcgtcttcgcgcggcgcgttgccatatcggcgtcgtgctgctggcgtttcaccaccgcgggaacggtacagaatgctttcaggtactgcttacgcataggcgtcagcgattcgccgttcgccatcgcatggctaagcgtattaataaagcgtcggcagggcttttgctctgtcatttgcaggcggtagcgcaacattacttccagcacatcgtcgtagcctgccgacaacgcctcctccgtccatgacattttccagtccatcccgccctgcaaaaacaggagcgccacgcgggtgtcattgcgattgatggccgagcggaaattattctcatcccaggtaacacccatgcgggttaacgtctcgcgtgaggaaggcgtttcgcgcatctcctgcacctgcgcgggagatgccgtactggccacagccggctgcggtttactgctggtcaccagccagaatccccccacgacaatcgcgataaccatcacgccaaccgctccccacagcacgccggaaatcagctgttcgcgctgctctggcgtacgcgcggcgcgctgagtcnnnnnnnnnnnnnnnnnnnnnnnnnnnnnnnnnnnnnnnnnnnnnnnnnnnnnnnnnnnnnnnnnnnnnnnnnnnnnnnnnnnnnnnnnnnnnnnnnnnnnnnnnnnnnnnnnnnnnnnnnnnnnnnnnnnnnnnnnnnnnnnnnnnnnnnnnnnnnnnnnnnnnnnnnnnnnnnnnnnnnnnnnnnnnnnnnnnnnnnnnnnnnnnnnnnnnnnnnnnnnnnnnnnnnnnnnnnnnnnnnnnnnnnnnnnnnnnnnnnnnnnnnnnnnnnnnnnnnnnnnnnnnnnnnnnnnnnnnnnnnnnnnnnnnnnnnnnnnnnnnnnnnnnnnnnnnnnnnnnnnnnnnnnnnnnnnnnnnnnnnnnnnnnnnnnnnnnnnnnnnnnnnnnnnnnnnnnnnnnnnnnnnnnnnnnnnnnnnnnnnnnnnnnnnnnnnnnnnnnnnnnnnnnnnnnnnnnnnnnnnnnnnnnnnnnnnnnnnnnnnnnnnnnnnnnnnnnnnnnnnnnnnnnnnnnngtttttctatgctgtcgcgcacttcaaaaagatcgccgcctgtggtgcggtccattttttgcgccttttccctacgaacgcgtgcagctcgctttcgtccaccgccatcagcgccgccgggttaacgcgtgtccgcccttcctcaaacgcgcgctgaacggagcgggtgatctgcgtgtaatagcagtcgagcagctggatttgcgccccgcttaacggctgctgcacggtgatgctgttgcggatttgtcgaatatcttcgaggaaggtttgcagggttttgcggggctctaccagcagcgtcagcatgtccggagcgttaaacagcggcgcgtagtagcggctaaattcttttttatccaccagcagctgggccagttcgctgaacaacatgccgctcagaacatcattaatctcaccgtttttcagccagcgacgcacgcgttcagcgttaaacaaggtcttaagatgattattcagccgcaccggatcgggccacgcctgctgtatcagccctttaatcatcagctcaatggcacgcacctgtttctgcgcctgaagctggctctccttctctggcaccctcccggtatcgtaggtcaggaggggctgttgcagacgcagatattcaagggaggtgacgaagcgcatcgccgcaatcagctgattttcgctgacatcctgcccgctttcatactggggaacacgctgctgaagcaagcgtaattgcagcgtaaaggccgtcatttccgcatcattcagattcagcttcctggctacggcgccccacccgcccagccccaggcgggcgctatccagttgctccagaaaccagcgtggatcttttccttcagaaacatgtacattcaacagaagtaaaatttcaacagacgcctgacggatcgctgccagacagtgttcaaactgttcgcgggtatgatgcgatgagctaatcatcattgttttccttgagagacaatgagtaccgctaaagcggcattaaaagtcgtttttctttttatttatatgaggttaaacatacctgactttctgttgaaataaagtgacaaccttataatcatttgcaatgcctccggaggatcgtcatgcccgccttaaccaccgcgcgtctcacctgctcgccgctgcaagagcaagactggcccttttttctgtcgctacagcaaaatcctgaggtgatgcgttttgtcgcccctgcgcgtagcgaggcggacattcgggaagcctttgagtctcgtctgttgccgtggacgccgggcagctcgcactggctctgccttgtggtgcgtgagacggccagccagacgccgctgggcgtaaccggctatgtgcaccgggaagcagattgtgctgaagtcggttttctctttgcgccctctgcgcaggggaaaggttacggctttgaatctctgcgggctgtgtgtgatttcgcgctgactcagggtaatatccgtcggctcaccgccaccgtgacggcgggaaatatcgcctcaaggcgactgctggaaaaaacaggttttcaactggaaggtgagttgcgtgagagttatttccttttagggcaatggcataacgactggctattcggtttactgaaaaaggaattcccgttcagttaaacctgatcaacagccatttggcggatatttccccggcggcgtttcctctatagtcgcgccactaagaggaaacgcttatgacgggttatgcaatgcagatatcttctgctgcaatcgcattaattaaaaaacaacagggtctttccctggagaaataccgtgacgaaaagggtatatgggttattggttatggtcacgtgattcgccagtgggaaaaatttaacagtctcatcacgccgattgaggcggagaatttgctttttaatgatattcaattatgtgaggcgctgctgcgggaaatgaacaaacgcccattaacccaacagcagcatgacgccctgatattaaccctcttcagttttggggaagagtcccctctgcctgagaagatccttcaggccgtcgcccgggtgtagtacatcgcggcctgcgtccggtttttgacatcaagacgccggaaaagcgtctcaagatgggcttttaccgttgccgcactgatattgagattacgaccaatctctttattggactctccggccgccagtaacttcaatacctcacgctggcgctcgcttaacactgccagttcatcctgagaggagtgctgcttcagccactcgccgggaaaacagaccattccacgcgatacggaatccagcactgcggaaaagcgttcgggattcgcattgcggggaactatcgccaccacgttgcgctgaaacatttgctcaacccaacgtcgctcttttttcgttaacaccaacaccacgcgcgacgctggaaaacgatccataatctcttccagtaaagccacaccattatcacgaattaaatacccatctatcatgacgatagcggagggtgacgcggataattgcgcccataattcatcagtctgacgagcccctgtcatctctattttcggaattaacttctgcaaactgtacatcgctccatgaataaataatgactgcctgtcaaacatgattactcgcatcgttttactcctctgagaatagcgaagggggattctacagaggcattttttaagaaaaaactcaatgaatggagaggttacaaatcacccagctctctttatatcttccagcatttagacatacctgttttaaggatttccttaagaggattccctcccccttaagactgaacattacaggaacataccgcctgaaacttcaatacgttgcgcattcatccagcccagtttgtcactgagcaacgccgcaatggcgtcaccaatatcatcgggcaggcccacgcgtcccagcgctgtctgcgaggccagcagctggttaagctccgcattatcccgcacgcgtccgcccccaaagtcggtttcaatcgcgccgggcgcgatgatattgacggaaattccgcgcgcgccaagctcttttgcctgatagcgggtcagcacttccatcgcccctttcattgccgcgtaggtgcctgaaccgggctgagtaaaacgggccagtccgctggagacgttcaggatccgccctccgtcttttatgagcggcagcagctgttgcgtgaggaaaaacggccctttgaagtgaatgttcagcgcatcatcaaactgcgcctcggtcgtctcggtatagggtgcgtataaccccgtacctgcgttgttcactaaatagtcaaaggtgtcacgttgccagacgtgtttgagggtatccttcacctgctgagcaaagcgcgaaaagcttgccgtatcgccgacgttaagctgcaatgctgccgctttcccgcctgttgcctcgatttcgcgcacaacatcctgcgcctcatgctggctgttgttccaggtcaggatgatgcctgtcccttccgcggccagcttcaaaacggcatttttacccaagccgcggctaccgcccgtcactaaagcaatacgttcactcataattcacctcgtttcggctgtgatgaagattgagaaagagcttattagatggtagaaaatcaataaatagtgccgtcagcgcttcactgtttcattcataacaacaatgaccaacatctatggataaaatacacgcaatgcagctattccttcgggtcgcggaactggaaagtttttcccgcgcggcggagacgttaagcctgccgaaggggagcgtatcgcgacagatccaggcactggaaaacgcactcggcacgcagctgctgcaccgtactacccgccgcgtcagcctgacgcaggacggcatggtttattacgagcgcgctaaagatctgctgatgaatctggacgaactggacggcatgttcctgcacgacccttcaaccatcagcggtcggctacgtgtggatatgcccgttgccattgcgcgaaatgtagtcattccgaaactgcctgcatttttacaacagtttcccggcattgagctggagctgagtagcagcgatcgtctggtcgatgtcatccgcgaaggatttgactgcgtggttcgcgtgggaaacttaaaggactccgggcttatcgcccgcccgcttgggaaactctcggtgattaactgcgccagcccggattatctgacgcgattcggctaccctgagacgctggacgatttggcttcgcatgccctcatccactactccgccacgctgggcacgcgtccgcagggttttgagtattacaacggcagcgcgacccagtgggtaaaaacgggaggcgtattgacggttaacagcactgaaacctaccaggccgcctgtatcgccgggcttggcattattcaggttccgcgcgtcggggtgcgtgatgtcctgcgcacgaaaaaactcgttgagatcctgccgcaataccgggctgaaccgatgcccgtctccctcatttatccccaccgccgtaacctctcccgccgggtgcatgtgtttatggagtggcttaccgaactcacaaaaggttacgtcgactagtcacaagctataattcagtaacatccagctcaacgaaaaggaaaatgcgcgtgacgccggaaaataacccgcaacgaccgactcaacatttagattatgaacccatcaaaaagatggataacgaacctgaagcgccgaaagagcctggaacggccagcaaagcgctgggcaccgtgaccggcatagccgaaaaaattcagcagatacccgcgattgctcacctgatacgcgccgctgagcgctttaacgaccgcatgggaaatcagtttggcgcggcgattacctatttctcgttcctgtcgatgatccccatcctgatggtgtcatttgccgccgccggttttgtgctggcgtctcacccgacgctgttgcaggacatcttcaataagatcctgaccaacgtcagcgaccagacgctcgccgcaacgctcaaaagcaccatcaacaccgccgtgcagcagcgtaccaccgtgggtatcgtcgggttgctgattgcgctctattccggggtgaactggatgggcaacctgcgtgaggctattcgcgcccagtcgcgtgacgtctgggagcgtagaccgcaggatcaggagaagatatgggtgaagtatttgcgcgactttatttctctgattgggctgctggtggcgctggtcattacgctctccatcacctcggtcgccggttccgcgcagcagatgattatctccgcgctgtacctggattacattgaatggctgaaaccggcctggcgcggcattgggctggccatttctatctttgctaactaccttctgttcttctggatcttctggcgtttgccccgccatcgtccgcgcaagaaggcgctgatgcgcgggacattgattgccgccattggttttgaggtgatcaagattgtgatgacctatacgctgccgtccctggtgaagtctccctccggcgcggcctttggttcggtgctggggctgatggctttcttctatttcttcgctcgcctgacgctgttctgcgccgcgtggatcgccacggcagagtataaagatgacccgcgcatgccgggtaaaacccaccgctgatatcatgtcgggctgatatttcagcccgattcgccatttcagcatataaatccaggccgtaacttttatttaacgcaaaaccagttttaatgactgatatttaaaaagtgtgaagcatttcatagaagtgttttcgctggtctgaaaattatccgctttttgttgcttttatgaccacaccacgcctttgttacagattgaaatgtcgcttttgctatgcctaatatggcccttcgttcgtccaaaaataagaaaatattatgcaagcaacagccaccacacttaacgaaggggcggaacacgttccggtcaactcgcgcaataaagtcgtcgtcgcatcgctgattggcaccgccattgagttcttcgacttttatatttacgccaccgctgcggtcattgtctttccgcatattttcttccctcagggcgacccgacggcagccacgctacagtctttagccacctttgctatcgccttcgttgcgcgtccgattggttcagcggtctttgggcattttggcgatcgcgtcggccgtaaagtgacgctggttgcctcgctgctgacgatggggatctccaccgtcgccatcggcctgctgccgacctatgaaactattggcattctggcgcctgtgctgctggcgctggcgcgctttgggcagggtctggggctgggcggggaatggggcggcgcggcactgctggcgaccgagaacgccccggcgcgcaaacgagccctgtatggctctttcccgcagctgggcgcaccgattgggttcttcttcgctaacggcaccttcctgctcctctcctggctgctgactgatgaacagttcatgaactggggctggcgtattccattcgtcttctctgccgtgctggtgctgattggcctgtacgttcgcgtgtcgctgcacgagacgccggtcttcgctaaagtcgccgcggcgaaaaagcaggttaaagttccgctggggacgctgctgaccaaacacctccgcgtgaccgtgctgggcacgttcatcatgctggcaacctacacgctgttctacatcatgaccgtttactccatgaccttcagtaccgccgccgcgccggtcggcctgggcctgccgcgtaacgaagtgctgtggatgctgatgatggcggtcatcggatttggtgtgatggtgcccatcgcgggcctgctggcggataaatttggccgtcgttcaagcatgatcgtcatcacctcgctgattattctgttcgcgctgtttgtcttcccgccgctgctgggttcaggtagccctgcgctggtgatggcgtatctgctgattggcctgagcctgatggggctgacttttggcccaatgggcgcgctgctgccggagctgttcccgactgaagtgcgttacaccggcgcgtcgttctcctataacgtttcgtcgattctgggcgcctcggtggctccgtatatcgccacatggcttcaggcgaactatggcctgttctatgtgggtgtctatctggcggcaatggcagcgctgacgctgattgcgctgctgctgacgcacgagacgaagcatcaggcgctgtaagtgaatgccgggtggcggctacgccttacccggcctacaatttagccctctcccgcaagggagagggagaaacgggactacttcttcatctgcgacaaaatcgtccgacactgattcgcttcgccttctgacggcgaaatcaacgccagcagcgccgccgcaggggtgaccagcgtagcgagcgcggcggcgaccgcaccacgcgcaatcaacggcccggccttcacgcccgcctgcggatctttgaaggtcccgcgaacgtacagcggcgagcgcagggtgatgatacgaatgcctttactttccggatcgatggttaaatccagctgctcggacgccatgctggcggtaccggtgacgttgataaccgcgttttccgtgtcgaaagcgaagatctgcggacgcgccacgccgttgaccagatccagatttgccgccgcgcagttaacgcgtacttcgtcgtcaccgaagatttgcccgatgataaagttcccgacgttcagccccaggatctccatcaggttacggctcaccagcccgtcgttcatcagcagcttcaggttgccgtttccgctacccagcagcgccgctaccgagttacccgtgccgcgaatatccgcgtcgccgttcatctcaccgagggttttctgcatcagctccacgtccggcatcagctctttcagcttcagccgacgcgcctggatctccgcccttccctgcatcggctttttatccccctccaggtggatattcgatgagatggttcccccggccatgccaaacttcagcggttgcaggcgcaggtcggcgtttttcaggatgatatgggtcgagaggttgctcagcggcagcgtgctgccatgctcaattttacgtcctttgaagcgcacatccgcatccatcacgtcccatttgtcggtttcgaagcggtcatagggcagcactttacccgcaggctgaacgtcctttttaacctctttagacttcgtgcctttgcccgaatctacgccaatcagcggaccaagatcggccagacgcagctggcgggattcaacgtccccctccagtttcgggcgcggtttaccggtggtgtaggtcagcgtgccgtggatatcgctgtcgccgatgcggccgttgaatccccggtagtcaaagacggacgatttttcggtgttgattttggcaaccaggcgcccgtccgtttcaaacggcggggtatctggcagcagtacgccggtcaaatcgtacagttcacccagcgaatccccggcaaacttaagctggaggtcgacgccgcccatgttcatcgggtcgttaaccgtgcccacgaacgccacgcgggtgttgcccgagcggaaatccgcctgcaccgggaacggcgtgccctcactcctgagcgccagcatgccgccgattttgcctttaccggtcagcggctggccgttgtagcgccctttcgccgtcaggccgaagacgtaatcgcccgctttgctgtcatcgcctttggctttactgcccgtcacttcgctaaacggcagcggcttacccagcggatcgacgaggatctccacgtcagccttactcaccttatcgtcaatggcgatcctcccccgatcgaacagaatattgtcgaggcggaaagaccacgaagagggctgcgcattctgatctttatcgccgctgctggcgagatcgaacgtccagttgttgtttttctctgacaggcgaattagccgcgcgtcgggctgctgaagtttgatccacggcagatacaccgttttggttaacagggctaacggcgccagcgtggcttccacgcgcggcaggtggatcatggtcacttcggggatgtccggcgggttgccgagaatgatgtcgtcggcgtgaacgtgcggccatggcacccagcttcgccagccggtttcctctttctggcgctcccacacgacacccaaatcgccacgtattgcgaaggggcggtttagctcggttgagactttctggttgatggtcggtttgagccggttccagtcaaacgtggcgataatgatgattaagaccacgatcagcaacaagaaaatccctgctgtccaggaaatcaccctggttgtttttgtcattgttgtcccctttcctgatgaacttgcctctaaaactatagttcagacaaagggaagcgggcagatcagagggtggttatcaccttttccagggtatccatggggacaggacgagagaggaaataaccctgtgccgccgctgccggggaattttgcacgtcgcgccactcctccagcgtctctacgccttccacaatgacgccctggcaatagcggttcatcagttgcaggagcatcgtaaacaggttccgtccctccggcgtctggcgcagcatgataaacagatcgcgggccactttgatgtagtcataacgcacttcgctcagggcggagaagttggccataccggtaccgaaatcatccagccacagcgggccaaactcacacatcgaggcaaacgaggagtcctgcggcagctgaacatgttccaccagctcgaagcgcatccacggcaaggtggcaatcagcgcctgcaacgtcgcgttctgacgtaacgccatcagggttgggccatccacgttcaccgacgccagaataccgtgctgctcgaagaacgcctgcttcgtcgccagcattctcagctgctcttccagcacgtcgatacgctgacgcacggcaacctccgcaaaatagcggtccggtgcaatacgctgtgaaggattcgatggatgagtgacgaccgttaacacctcaatcgccattaaccgaccgtcggtacggtagatgggctgataggtgtacgctcgctcacattgcagccagtagcgatgctcctgcaagttctcaatacttgcctcaggcgtagtgctcagccgctggataacctgctctgacttcatttcggatgtcctgttgtatgggatagcctttctggactcgtcactgagttatcggcccgccaggtgagaactttatgttcaattcaccgggaaaatgaaattaagatgacagaaatatgccggaatacgcgctggctcaaaaaaaataatggaacgtcgttttaatatagttgaccataaaaaacacacagcgcacactacccttaattactttgttcaggttcacgactatgtctaaaaaaattgccgtgattggcgaatgcatgattgagctgtcccagaaaggcgcggaagtcagccgcggttttggtggcgatacattgaacacctccgtttacattgcccgtcaggtcgcccccgacgcgctgagcgtgagctacgttaccgcgctgggaacggacagcttcagccagcagatgctggaagcctggcagggtgaaaacgttgggacctcgctgatccagcgaatggaaaaccgcctgccgggtttgtactacatcgaaaccgacagcaccggcgagcgcaccttctattactggcgtaatgaagcggccgccaaattctggctggaaagcgaggccgccgctgccatttgcgaagaactggcgaccttcgattatctctacctgagcgggatcagcctggcgatcctgagccaggagagccgtgaaaagctgctgtcactgctgcgcgaatgccgtgccaatggcggtaaggtgattttcgataacaactaccgtccacgtttgtgggccagccgcgcagagacgcagcaggtctaccagcagatgctcgaatgcaccgatatcgccttcctgacgctggatgatgaagatgctctgtggggcgaaaaaccggttgatgaggtcattgcccggacgcaggctgccggggtcagcgaagtggtgatcaagcgcggggcggagtcttgcctggtggcggttgcaggtgaagccgtgacagaggtgccggcggtgaaactggcgaaagagaaagtaatcgataccacggcggcgggagattctttcagcgcggggtatctggcggtacgtctgacggggggaacgccggaagcggcggcgcagcgcggccacttgacggccagcacggtgattcaatatcgcggagcgattattccgcgcgaggcgatgcctgcttaaggactgtgcgggctgatgcccgcaccctaaccctctccctcagggctgagggaacgcagagcttactggcccagcggaatatcgctcgcatcctggtgtaaatcatcggctgccgtttgcgctggctgcggcggcgtcgccatgatggcgctccaggtggccttcaactctttcatgtcatattccggctcacctttcggctgcaacagaatcaacgccatatcctgcgacagctgctgacgcagatcctgattcagcatctccacggtcagaccgttcaggaagtcctgacgcagtttctgatactgctccggcgcgatatccaccacctgattctgcaaggagcgaatgcgctggctgattaagatatcggtatcggcgcgggcataggtggcgaacagtttctgcaattcgagggatttctgcgccaccagcgcgttaaactcctcttcagacaggccctctttccgcaccttagccagctctttcgccaccacgccgagattggcattcagcttatcacccggcgattccacgttaatggcgcactgggcgcgctggaacagcacacggcagtcaaatcccaggccaatatctttcacgttgttcttgctgagcgtctgctgaacgtgccagaacagcgcttcacgcgcgagatccgcacgccagtaacgcaacagcgcagaagactcgcggatcggctgccaggccgtatcccacatcattgaaagacgatcctgacgcacggtatccgtcatgatgctgaccgtctcaggacgcagcggggacaaggtaggaacaggggcgggcgtttcacgcttccctttcagatcgccaaatgctttgttgatctgttctatcaccgcacggctgtccacgttgcccaccacaatcagggtcatggcatctggggtgtaccactgctggtagaaagatttcacctgcgcggcatcaaccggctgtttcagcggctctgccgggtcgtggccaagcagcgttgaccctttcaggcggtagcgccaccagccttctttggtatccgtcggccaggtcgccaccatgtcgctgttgctcaacgcatagttaacggtctcaggcgtaatcgccagtttgccggtggcatccgaaagataggtcagtgcttctttaagcagatcgttacggttgttgggcaggctcaggttaaacatggtgtagtcataggagaccacagccgggggcagcgggcgtttcggatcgatggcctgttgccataaagaacgcacctgaaccgcctgcaaactgccgctctgggtgagcgccagtcgaggaataaagtggcttaagccggtctgctgggtgctttcagtgagggagccggtattcacagaaagacggatttcaatgcgatcgctcggacgttgcggagtggataatacctgccactggaaaccgttcgccagtgttccctgttgccaggccgggtctggctggagcgcatctgcctgcacataactggctgctgccatcatcagcaaaccgccggttaagagtcgaatttttgtgccctgcatgtgaacccctgatcaacattcctggttaaagagagtgtctcgcgacgtgagcactcaaagatgacgatgaaaaccttccgattagacagcgtgttcggctaaacgtcacgggcggaagtgaaatatacccaaaaaaaatcttgtcgaattatgacaggtatgaacggttattatgcgcaggtgcccgcatccccacaagggaatacgggcatttatgagggattaagaggataaaccgggggttttgtcctcagatgtgcggttattcagcgtatcgttaagcttcttgtgatccagctctttcacccacttcgccaccacaatcgtcgccacgccattgccgaccaggttggttaacgcacgggcttcagacataaagcggtcaataccgaggatcagggccaggcccgccaccggcagatggcccaccgccgaaatggtggccgccagcacgataaatccgctgcccgttacgcccgccgccccttttgaagagagcagaagcaccaccagcagcgtaatctgatggaagatatccatgtggctgttagtggcctgggcaataaagaccgccgccatcgtcaggtatatcgaggtgccgtccaggttaaaggagtagcccgtaggaataaccagccccaccactgacttacggcagcccagcttttccattttatcgagcatacgcggcagcgcggactccgaagaggatgtgccgaggacaatcagcagctcttcacgaatgtaacggataaatttgaagatgctgaagccggtcgcacgggcgatggagccgagcaccaccaccacaaacagaatacaggtgatgtagaaacagacgatcagctggccaagctgtaccagcgtgccgacgccatatttcccgatggtgaaggccatcgcgccaaaggcgccaatcggggccagacgcatgatcatgttgatgatgccgaagatcacctgcgagaagctttcaatgacgttaaaaatcagctggcctttgctgccaagacggtgcagggcaaagccaaaaagcacggcaaacagcagcacctggaggatgtttccgctggcgaacgcgccaatcacgctgctcgggatcacgtccagcaggaaggcaacaataccctgatctttcgcctgttcagcgtaaaccgccaccgctttcgcatccagcgtggccgggtcgacgttcatgcccgcgccaggctgtaccacgttgacaattatcaggccgataatcagcgcgatggtactgacaatctcgaagtacagcagggcaaccgcccccgtacgcccgaccgccttcatgctttccatgccagcgataccggtcaccacggtacagaaaatgaccggcgcgatgatcattttgatgagcttaacgaacgcgtcgccaagcggtttcatctgcgcgcccagctccgggtagtagtgaccgagcagaataccgatggcgatggctgtcaggacctggaagtaaagacttttgaagagtgaggttttcatagggtgtccctggaaagaaaaactacaggctttgtaaggttatggttaacctgcggctttaaaataacacccacataacaggacagaaataaacggggttcaaatttgaaacacaaatgttaagaactttgagctggctcgcacaagccagcaacaaaattacacttttgcgttattgccagcgtcggcgagatagcgttgctcaaagatatccgtcggtacggcgcggtcaaacaggaagccctgtccgctctccacgcccgccgcagccagccactcacgctgggcgtcggtttcaataccctcggcaattacgtgcagattcaggctgtgcgccatctgaataatggcctgtaccaggctgcaatcctccggcagcccatccacaaaggttttgtcgattttcaggacgtccaccggcaacgttttcatgtgctggagctgacgcaggccggaataccccataccaaaatcgtccagcgcaatgcggatcccggcattacgcagcggtttcagaatggcgacagcatcgtcaggattgtcgatacaacggctctcggtgacttccaggatcaacgtgtggggctgaatgcggtagcggtggatcaactcgagcatctccggcaccatggtcgggtgcatcagctgtagcgcagagagattcaccgacagcggcagcgtgatgccccgttgttgccaggccgcaagctggcggcaggactcttccagcacccagtagccgacggtgaccatcaggccgcaggactcgatacgttcgatcatcccctcaggcagctcccacgtgccgtccggctgttgcatacgcagcaacgcttcggcgctggtcacttcacccgtgcgcaaattgacctgcggctgtagccagagcgcaaactggcgattgtccatcgccgtcagaatgtcgctctcttccgtcaggcgctgctgggctttttccatctgctccggatcaaagaactggatctggtttttgcctttccggcgcgcggtgaacgcggccgagaaggcccgacgataaagctgctcggcggtcagccccccgtagtacatctcaataccgatgctggcgctcgggcgaagctggataccctgaatgggcagccgctcattaatgacagtgagtacttgctgacctagcgtaatggcgtgccacggctctttaacaccgtgcgcgatcaccaccaggtcataaccgctgacctgggtgagcaccatgcgcggcgccagaacggatttcaccttttccaccagcgtcagcaacagcatctcgcgctggctctctttcagcacgcccgccgtgtcctgcaaggtttcgcaggcaatcaccatcagcgcggtggtctgctggcgggcgacggtctgctccagcaaggccattaaaaacgctttgtttggcagatcggataccggaaaacgagtggcgttgctactgagctcatcctgctgacgcaggacacgctgctggttgatattgtaactccggaccagcatgccaatttcatcgtcgtgatgcaggcgcggcaagggaagctgatgccccatgtgctcctgaggagagaggtcgttcagctcccgggctatgcggcgcaacggatgcacaattaagcggttgatgcaccacgtcagcgccacgctcagcattaatgtcaaaagcaagtaagtggtcactaacgtagcaacccagctcatgacgaatttatacatgcggtacgagtcggcctgtagcaccaggtaggccagcggctgcgggttagccggtctttccagggaatagagaggcagggaaatttgcaccggcagttcaaacaggcgcatcaccatcatcgggacgggacgctccggaataaagctcatccgcagcgcctggaactggttcggcagtacgacatccgcgcggctcacgataccggcgggctgaatgcgcttcaggatagattccgcctcggggatatcccctttcaggatcgaggccgacaggggttcccgcaccgagcgggcaatactttccagttgcgaagccgtgttatagcggttctgctgtacggagtgaaacagcaaaatgacgcagaagatgaagacaaacagcattgtgacggcagacaccatcgccatctgtttgatcgttaaggaacggctgacacgcaaaatgactctccacaaaactcgaagcgcagggcgcaccagggtgtaaacctggtgcgcccgagtatacccgatagctgcacttttaagagagacttacaattagattaagaaaaaatccgatcaccagtctgcataaggcaccagcggttccggtggtaagtccatatcaccttgccagcccgcggcagaataccgaacgtagagcagcgcatggctcggggtatagtcttttgcttcctgaatatcgacgcccagtccgacaaaccagttggacgtcacgcggcgttcaacaatcgcccttgcggtataacccgtgcctgacgagctacttccggtttccattacacctttatcggtataacggcctggctcattgtccgggatcagtccctgtaacggataacgcatcacatcttttgtttttgaatgggaccatgagacggagccgcccagctcccatgaccagttctctgtgcgtttacgccagttcaccggtaaggcgaacgacacatactcctggggactgtagtaaccgccctggcccagcgaatagccacttaaatccttatcgtaatgccagagcatgttggacacgcccaccgtcaggcgttcgttgttctgattgatgagcttgtagtaatagccggtcatccagcggacgcgccagttatcttcgacattcttcccggtgaggctgtcggcactcaggcttgaccagatcccgttagcttcgcctttgtcgtagctcatgctcacgccgccaccggtggcacgcacgccgccccaggtggtgtcggtattgggatctttnnnnnnnnnnnnnnnnnnnnnnnnnnnnnnnnnnnnnnnnnnnnnnnnnnnnnnnnnnnnnnnnnnnnnnnnnnnnnnnnnnnnnnnnnnnnnnnnnnnnnnnnnnnnnnnnnnnnnnnnnnnnnnnnnnnnnnnnnnnnnnnnnnnnnnnnnnnnnnnnnnnnnnnnnnnnnnnnnnnnnnnnnnnnnnnnnnnnnnnnnnnnnnnnnnnnnnnnnnnnnnnnnnnnnnnnnnnnnnnnnnnnnnnnnnnnnnnnnnnnnnnnnnnnnnnnnnnnnnnnnnnnnttgggatctttttgcccggcgaaggccagcaccgagctggaaatcggacggcgatgggcgttcagggtgtagccaatcggccctaaatcgttgctatagctcaggctgcccaccacatcgaccacgtcgaagcccatcggcgttgtaccgatatcccacgcccaggttttgttctgccagccgacggccacgctggcgccgttggccgactggtttgtgctaccgcgacatggcgtttcggcgcaggtaccccatgtcggatcgtaggttccgttatcggtggcaaaggaaccggcgttcatattgaccagatcgctacggaagaacatacgtccgtccgacagcggcgcatcaacctggagcatggtggtgtgcgctttcaggtcggaatagcctcccgtgccgctggacccccagtagtcgtgttgcagcgtgacgttcagatcctgctgacgataaagatcgcctgcatcgctgcgcacgccgcgcttcagccagtcatctttctcatcgttacgcgtgagccgcgtaaagctgtcgttatcggtcggacgggtcgttgtgatgcccgatgagaccatcgcatctttccaggtgtccagcgcctgctgaggctgaccattttgtgcctggaaacgggcggcatcgcgcatcaccagcgcactttccatcgaaggcggctgcgatttggcctgcggaagaatggcgttgaaggtcttttctgccgcggcatgatcacccaggccagcctgcgccatggcaagccggcgctgcatattgatggagagcggttcgccgttctgtgccgcgggcagtttcgccagcgccgcgcgcgccgcgtccttgttgtcctgggcaagatagacctcggtcaggccgaggatcgcgtcttcgttctgcggttcgcgttgcaggacggtgttgtaggcggttttcgcggcctcatgatcgccacgctgttcagcccagtccgccagcgtcaggtcgatacgggtggacggaggctgctggcgaagcaacgtttccgcctcctgctcttttccactgtcgcgcaggcggttggcggtttccagcacctggttactttgcaggcggtccgccagcgcctgaatgttgccgttccacttgtcgcgcggcagcgtgttcagatgcgccagcgccgcccggtcctgatcgttaccggacaggtacagcccgctggcgtaaacctgatccggatcgcccggtttctggcttgccagctgacgcatcaggttatccgcctggctgcgctgacccgcgctatacagatcgcgtgacagtcggtaggtgatccacacgtcgcccggggaaagcgcaaggcgtcggcgctgaatttctgcggcctgcgcatatttcccctcgctttccagctgttcggcctgggctgacagctgctcgttcgtcaggctacgttcaatatcatcaatgctgcggcgctggctggcagagagcgactgaataaactgcgtcgccttctccggagactgcgcacgataaatattggcgagaccgcgcaccgcgttgctgttgccgctgtccatccgcaacgcctggcggtaatagcgctcggccgcgtcgttatctttgcgcgccgccgccgcatcaccgaggcccagaaccgcgtagctgtcggtattgtcgatattgcgcgcctgctggtaatagcgttcggcctgggccgtattgttggctttcagggcgttatccccctgctggatcagcagccagtatcggttgaccttcagcaggctctcccatttgccccggttatcgctctgcggatcgagggcgatcgccttttcaaactgcgcaaccgcacgcgcgcgatcgcctttctgagaataggcctgccccagcgcgcctacggcttcactgtcggcgtggttggcgctgactgctttctgcaactccgttaccgctttactgccctgcccggcatccactgcggctaacccttcggctttggcgcggaacgccggatcggcgagctgtttttgctgcgcttcaagctgggcgcgcgccgccgtcacgttatcgccatcgctgaacacgctcaggtattgttgcagcgcggtaacgctggcgctgctggccggctgatctttgatctgctggtaccacatgtccgacgcctgactgcggccattattcgatttggccatctcctgtaacaccgcaaacccttcatcacgccgtccgctctggaacaaaagctgtgccagcgaggactgtagcgggacgttacccggactgctggcgtttattttcttaagctgattaatggcctggttgcggcgggctggctctttcgccaccacgttccagtactccgtcgcgatgtcgccactgggcggcttaccgacaaacagtttgtcatacgcggcaatggcttcctgggtgtgcccggtggtggcaagcaggcgagcctgctggagggcctggcgaccatccggcgtggagagcagcatggtagtacgggaggactgataggcactggaatcgggcgccattcctttcaggcgatccagctctttttgcgcgcccgccgtatcgccctgtcgtaacaggtagcggaagcgcgcggcaatcacgtccgggttgttggggtcgatcagctcaaggcgatagagcgactggcgcactaaatcctcacgctgggtggattcccccagacggacctgttccagcagctgtctctgctgcggggagttggcggcctgggccaggggcattagcgccaggccaagcgataaggtgagtagattcagtgtgaacgtgcgcattcctggccccagtccggtagtaattcaccttgcacggtgaaacgaaaacgatgctgatcccacccttgtccaaagagggtcagaacgtagctgtaataagcattgttatcgggaaaacgatcggcgacgtgctggcgttgcaccgcttgcgcgtcccggttttgtaaaaacggaaggagggaggcagaaaaccctaccggcccatctccggtgcgtttcccggtcgcgacgtccactttctccggcggcaagccttgtttgattgtggtggtcgccatgggcttgaaacgcgccagtagccgggctttctgcggatcgttatcgttcatcatccctacccacagatagacgcgaatcgcatcgtagctgccgatcagggatgcatcctgcgacagctgccagccgccctttttctggtatttcacccagttcggggaaaatcctttaggcgcggtttccagcagcagacgcaggttggtttcacggagcgtcgtccacggcgcgccaaaacgggtgaaatagctcgcaagttgcggcggcaggtagctggggttgaagcgccagacgctctcttcggcaaaaccgactttacccggcagcagcatagaacccagccccggcaccttcaccacttcctcactggcaatgcgcgtcaacagcgccttacccgtgcgcgtgtaatcgggatttttccacagccgcccggcttccagcagcgaccaggcaatccagatatcggcatcagacgcggagttagggtcgataaccgcccaggtttcgtcgtcctttttcccccacagccaggccgggagatgttgggttaaatctccctcggcaaggttatcgcgcgtccatgccagcagcagatcgaacgccttgcgatcgtttgccgcgagggcaaagaacagtccgtagctttgcccttcggaggtggtgattttgcgcgcgtcactgggatcaatgacgcgtccactttcgctcatataatcctgcttgaacgtctcccaggcaggccagcgacaggcggcgtgaagattcgccgccgccagcatcaacgctgcgactacacacccgcgaaagattttcatcaccgcttactcatggtccgggttaagacgacgacggctgatgattcgcagcagacgccacagtacccacgccagcagtacaacgctgagcgcagccagcacggccagcagcaccgggtggttagacagggcgtaccacaggcgttcgaaccacggcagatgaccgacgtagtagacatcccccacgcgcaggctgtttacccccgactcacggatcaccgagacggaaccgaacattgccgcccgtttaccgctgtcgttcatggccgtattgagtagctcatacccgcgcgggctgtccgccagcagggcgataacgctgcgctggtcgttgtacggcgactggaagccgacaatcgcggccatcggacccgttgagcttacggtcgtcctgatattggcctgacgatcgccgctgtccggcatgatgctcgggaactcggtctgacgcagcggcgtgttaacccacgactgagccgcctgcaccagcagatcgacgcgcttctcgtctttcagcttgtccggaatgttgccgatgaccatgatatcggcatctttgttctggatctggctcccgtcatccgtcaccgtcacgttgatagccggcaagccagtttgcgccccgacggtgcccatggtgtccagcagcgtagtaacctggccttcgttggccgcttttggcatcacgacaattgattcggagaggtctgccatgcggctgaacgggaagctggcgttagcaaaggcacgcagatccggcatcgcaataaagtggtaatacttcgagaagtcgatcgtggagtcgtcaccaatcaccacgtggttttgcaccggctggaaggtaatgcagttttccaccgatcctcccggcatggggttcatatactggaagttaaaccgcagctggtttaccgcaccaagcttcagcgccggaatcgacacatcggttttgccgtccagcagcccctgcaatacaggcagacgaagcattaaccggtttgtctcctggctgctggtcaggctgaacgattgcaggaactggttgttgaggctgatatccatgcgcgagctgtctttggttgccggcgcggtgtaacggtagttcaggttgatatcaatgccgttagtgcgcagcagatagagatccggcggcaggttcagcgacaggctgacaggagaaggttcaagcccggttgactgcaattgctcttcataggttttcagttcgccaaaggtgatggcccggtcggtacgtacccagttcggcgcatcataaggcttacgtgccagcagcggtttcacctcgtccaccacaacgctgttaccgcggaacaggatattcccctgcgcaatgcctttcgccgcctgcaccagatctttgtcatcacggccgaagatcaccaacagcttcacgtacggattgtccggatggctgatcatctcgatggtgggcgctttcacctccggatggtcacgcaggaaagccggacgtttggtgttggtggcaaacacgatcgcgtttttgtccggcattttgtcgtacatgaccgggaaactttgaccacgccagccggagcgggaaccaaaccaggatgccacgatagaggccgccagctgttcggtcacatcgggcgagccggcaaagaccatcggcaggttcagcagacggttatcacgcgggtcgaagaacggcaccgggaaggcggagagatcgtttttcaacgccagcggctgataggtcatctgaagcgaagagttacgcccgacatccagccacagggtgctgctggccgggttttcacagacatcgcggtagtggccgacaaactccagacgcacgcggttaaagtcggtgataaacagcggattaatcggcacctgagccagggttttcttacccagttgctctttggtgacgggcaggacgtccatcagctcgtcattcagatagaccttaagctgggactgcaccggcagcagcgacggcgatggggtgtattccaggttgagcatcgctttcgacacgacttcatcgctgcgcataccgaattcgataccgccatttgggttgatgccgcgcagaaccatgctgcccggaggaggcgcgatctgggcaaacgtcagcttaacgtcacgcgacggcgtattttcggcaaccaccggcgcactggctcccggcacgccaggcatgacctgcccaaccaccgggttgtcggcgggcagcgtattccccgtcgtcggctgattcgggacaacgttctccgtctgccccggcgcggccgtcacaaccggatcggtcgcttgcgcgacgacaggcaccgttggcgcgggcgtggtcgctgcgttatcaggcgctgcgttagccactgttgcagggagcgcactcatccccattgccactgcacataaccaggaaagttttgttttcatcgcgttatcatcattgttgagccataaccgggtccgcctgcttcgcttcatctcgctcaggtcgacgcggaatgaacgacacgacccaggaaaccagtgaagtaagtgaccggaaaattaatttcaccgacgacggggcaaattctgcaaggtgacgatagccacggaaccccagcttaagaatatccagcaggctttccagaggcttatcctcagggaagctgtcctgccagagagcccacgtatccgcgcgggcaaacgtacactgcacaaaatcaatgtgttgctttttagtcagcggcatcagttgcagacccacttcatttcctctcacacgcaccacctgcgtcgggaagacatactcctgctggccgcgcttaagcagtaggttgaccttctgcccctccagcaccttcgcctgaccgttgatcttgatacccagaccgccatccgaaaagtcatgtacggtacaggagaagagatgtccatcgtcgcgggcaatggccgctggcatgctgatttcgacgcgatgcgcacggcgaacctgtttgctctccaccgataccgccaccgcgccaccgaggataatcaggttataaaacacccacgccatactcacgaagaccgtcagaatttcgttttccgggccgtagaagtagcgccagatcccaacaatcacgcccacaatattcagcagcaccaggaagatatagggccgggagatcacccagtcgacatactcctcttccaccagcccgcccttcgcggtgacgttgaatttccctttatgcgggttaatcagcgccaccatggttggcggcgcgatgtaccaggccagcaccgtttcgtaaatttcactccagaaggagtggcgatatttcccctgaatcttcgagttcgtcaggctggcgtggatcatgtgcggcagaacgaacagggcaatcatcagcgcaggcgcatagatgatgtaagcgtgaaggagcaggaacgccagcggcgcagtgaggaagataagccgtggaataccggacaggaagtggaacatggcgttgacgtagcacagccgttgcgccagcttcagccctttacccatcagcgggttatcgagcctgaaaatttgcaccatgccgcgggcccagcgaatacgctggccgatatgcgccgacagggattccgtggccagccccgccgcctgaggaatgcgcatgtaggcggaggtatagccaagacggtgcagacgcagcgaggtgtgcgcatcttccgtgaccgtctcgacggcgatcccgccaatttcatccagcggtttccggcggatcaccgcacaggagccgcagaagaacgttgcgtcccacatgtcgttcccgtcctgcacgagtccatagaacagcgtgccctcgttcggggttttacgaaaacggccgaggttacgttcaaacgggtccggcgagaagaagtggtgcggcgtctgcatcatcgccagctctttctccttcaggaaccagcccatggtcatttgcaggaacgagcgcgttggcacgtggtcgcagtcgaaaatagagacgaactcccctttggcatatttcagcgcattgttgatgttaccggctttcgcgtgttcatgcgtggtacgggcgatgtactctacccccacttcgtccgcgaactggcggaactcggcacggccaccgtcatcgaggatccaaattttgattttatccttcggccagtcgatacccagcgcggcgtaaatggtgttttttaccaccgacaggtcttcgttgtaggtcggcacgaagaggtccaccgtaggccactgggtcgtgtcttttggcagcggcaccggctgtctatttagcggccagataacctggaagtaacccagcaccagcacgatccaggcgtaagtctcagcaaacagcagcactaagccgcacaccaggctgaccggatcgtcccagttcagcgttgaggtatatcgccaccagatgtagcggcaggaaacggtcagcgatagcacaatcagcatcagggcagaaaaacgccctggtatgcgccgcaccagcagcgccacgccccacagcaggatcaggaaggtgaactgcgccagcggattgaagggctgggtaatacagaccagcgcaagaatcagcgagaacaccacaaccacgccgagaataaaacgccgcaagcccaggtgtaggtgcccgagctctttgtggttatctaaatgacccgttttgtcgcccacccggtcaggtagccggtcaagccactggtggtagtgttcacgcaggttctgcacacgatcgaagctgcgccagcgggacgtttttttctccgcgcccgttgaggtcgttagtagccagatggactgaatagcgtagcgcgcgggatccagcggacgcggcttgtcagggttgatatgcggatagagttcaccgtggcgcgcacgaatgcgttgccagcggggatgttcgagggggatgaacatccacgccagaatcatccacaaacagcccagcgcagcgctcagcgacgaggcgccgtgatgacggtaatggcggtagcgttcacttaagcgcgaactgaccggcggaatgagcagccagttagtcaggcggctcatactgaactcccggcaggctccggccgtttagcaaagtgcagcagacaccagtttgccagcgtcaggatctcttccgccgccagtgaatcgctacggtactccccgagaggttgtttggacgcgaggcactccgccatcgcttcgtcacgatggatcaccatcggcaacaggcggcgctgactctggagccagacctggtagagatcgtcctggatctggctgccaatgcgcagatcgttgatcagaatatgggcattggcaggcatcggctgctgatgcagacggatatgacaattcgcatctacgttcgcgatggagagcacatggtcgcactgcgccagcagctggcgggtcagcgacgcggcaccgtgcggcaggtccagcaggatccactgatagtgcccgctctctttcaggctctgcaatgcggtgatgaagcgagagaacaggcgctggtacgcggcttcattcccgcgctcggtttcggtcaattgaccaaagggaagcaaatcgagctgggaggtataacgcaaacccgcatcccgccagtctttatcgtccagaagcgcgcgtccccagccgtttgcatgcgtaaagtcgacattgaatgacatgcgcagcaaattatcggaacaggcatcaatgaccagtaccgattcacctaatacctgcaatgaccacgccagcgccgcggtaacggaagttgtacccaccccaccacggacgccctgtaatcctagtacagccatcaatggcttccttattgttgttgggcaaactcagctaataacggccaacgtttaatagccgccgccaactgttcacgctgggaaatatcggtgtaatctatttcaggcaaagaaaaagcctgcgtgagtgccaaaaaatcgttctggaatgtgtaacccagacttgagtcgactggggttgcgggttcgttattttgcattcttttttcatccctttgagtaaaatcataagattcagatgcagcgaggcgtcctgcccattaaatttcatttacatgctaaatctgatgttctttaatttcaatgttaggtttatttctacgctttcgctagtaaactgagagacatagaaattcgacgaaaagagggacaccgtggactccatattttctattggcatccagtcattatgggacgaattgcgccacatgccagtcggaggagtctggtgggttaatacggatcgtaatgaagatgccatcagtctggtaaaccagacgatagcggcgcaggggaaggattcccgcgtggccgtcattacaatgggcgaagagccgaagtcaatcatcaggctcgacagtgaccgtggaccccagacagtacgattattttccatgcctgcggaggctgacagtctatactttttaccccacgatattcagtgttctattgttcctgaacactatttactgattctaaaatgctctaataacggcctgcaaaatatcccgtctgaaaaactgctgaaatggctgggaagaatcaacagatgggcaaaaaatcaaaattgcaccttattggttgttaacccaggcagtaataatgacaagcttttttcacttttaatgagtgaataccgttccctctatggcctggccagtattcgtgtccagaccgacagccatctttacgacgtggctttctggtgcaatgaaaaaggggtgagctcccgacaacaacttaccctcaaacatgtcggggatgagtggcatcttgctcaacaggaagagacggtagttcagccacgcagtgatgaaaaacgtgttctgagccatattgcggtactggaaggtgcgcctgcactgtctgagcactggtcactgttcgataccaatgaagccttatttgatgaggcgcgcaccacgcaggcggcgaccattatcttctcgttgatccagaataaccaaatcgaaacgctggcaaggcacattcacacattacgtcgccagcgcggcagcgcgttaaaaattgtggtgcgtgaaaataataccagcctgcgcgccaccgatgagcgcttattactgggctgcggcgcgaatatggtcattccgtggaatgctcccctgtcgcgctgtctgacgctgatcgaaagcatccagggccagcagtttaatcgacatgttccggaagatatcagcaccctgctttcaatgacacagccgatgaaactgcgtggctaccagaaatgggacaccttctgcgatgcggtgggcaacatgatgagcaatacgctgttaccggcagacggaaaaggggtgatggttgccctgcgccccgtgccgggtattcgcgttgagcaggcgctcactctgtgccgccctaaccgtatcggggacatcatgaccattggcgataaccgcctggtgctgttcctctccttctgccgggtgaacgatctggatactgcgcttaaccatatcttcccgcttcctaccgcggatatcttctcgaaccgtatggtctggtttgaagataacctgatcgcggctgaacttgtccagatgcgtgccctgccacctgaaaagtgggccaaaccgttgcctgtcacaagcggcgccaaaccggttctgaacgcgaaacatgacgggcatgtctggcgacgggtacccgagccgctacgcttactggatgagaacaaggagagcgcgccattatgaatatcagcgatatcatccaactggttgctctgtgcgcgctgatttttttgccgcttggctactatgcacgccattccctgcgccgtattcgcgatacgatcagattactgttcgtcaaacctcgctatattaaacccgccggaacactgactcgcgctccgaacgtcaaggcaaaccgaaaacatgactaattctacctatacctcttcggcgccctcgccactctggcaatactggcgcggcctgtccggctggaatttctactttctggtgaagtttggtctgctgtgggcaggctatcttaatttccaccctctgcttaacctggtgtttatggcattcctgctgatgccaatcccgaacctcaggctgcaccgtatacgtcactggatcgctatccccatcggtttcgccctgttctggcatgatacctggctgcccggccctgaaagcatcatgagccagggctcccaggtcgcaggtttcagtgcggactatatgctcgatctggttgagcgctttattaactggcagatgattggcgcggtatttgtcctgctggtcgcctggctgttcctgtctcagtggatccgggtgacggtgtttgtcgtcgcgattatgatctggcttaacgtcctgacgctgacgggcccgagcttctcgctgtggccagccggtcagccgacgacaaccgtgaccaccacgggcggttccgccgccgcgaccgttgcgacagcaggggatacgcctgtggttggggatattcctgcgcagactgcaccgccgacatccactaacctgaacgcgtggctctccagtttttacgctgcggaagataagcgtcagacgaaattcccggacgcgctgcctgccgatgctcagccgtttgagctgctggtcattaacatctgttctctgtcctgggctgacgttgacgcggctggtttgatgtcgcacccgctgtggtcgcatttcgatattcagtttaaggacttcaactcggccacgtcgtacagcggcccggcggctatccgcctgctgcgcgccagctgcggacagccttcgcataagaacctctaccagccggcagctaaccagtgttatctgtttgataacctcgcaaaactgggctttacccagcacctgatgatgggccataacggtcagttcggtaacttcctgaaagaagtgcgtgaacagggtggcatgcaggccccgctgatggaccagaaagggctgccggtaacgttgctgggctttgatggctcgccggtgtatgacgataccgccgtgcttcagcgctggttagataccgtcggcaaagaggaagggacacgtagtgcgacgttctataacacgctgccgctgcacgacgggaaccattatcccggcgtgagtaaaacggccgattataaggcccgtgctcagaagttctttgacgagctgaacgcgttcttcaacgagctggaaaaatcaggtcgcaaagtgatggtggtggtagtaccagaacacggaggggcgctgaaaggcgacaggatgcaggtgtctggtctgcgcgatatcccaagcccgtccatcactaacgttccggccgggattaagttctttggcatgaaggcgccgcatcagggagcgcccattgaaatcacccagccaagcagctatctggctatctcggaactggttgctcgcgctgtagacggtaagctgtttgtggaagatagcgtgaactgggatcaactcaccagcgggctgccgcagacggcggaggtatcggaaaacgccaatgcggtggtgatccagtatcagaataagccttatgtccgactgaatgccggggattgggtgccgtatccgcagtgatgacctgctaccccctctcccctgtggggagagggttactccgcacttcgtaacgaaatttcaccgcccacccagggcttaatcacgccatcctgttcaagaagcaacgcgccctgcgcgtcaatgccgcgtgatgtgccgtaaatctctttatccccaatcagcagctttaccggtcggttaataaagttatccagcttttcccagcgggacaggaatggcgctaacccctcttgttcaaagagcgtcagcgaactacgcaactcattgatcatgcggacggcaagcgtattgcgatcgatggtgatccccgcttcctgcaagttggtccaggcctggttcacgacatcgttctgcacttttcgcatcaccatgttcagtcccgccccaatgacgatctgtgcggcatcgcctgtttttcccgtcagttcgaccaggatccccgccagctttcgatcgttgagatacagatcgttgggccattttacccgcacctgatcggcacccagatcgtgcagcgcctctgccatcacaatgccgatcaccaggctcagcccgatggccgcagctggcccctgttcaagccgccagtacatggaaaggtagaggttggcgccaaatggtgagaaccacttacgcccccggcggccacgtcctgcctgttgatactcggcaacgcaggcatcaccggatttcagctcgctcaggcgatccagcagatactggttcgtcgaatcaatgaccggcaataccgcgacgttaccgtgcccaatctggctgcggatgacctcttcattcagtaactggatcggttccggcaggctgtagccttttcccggcaccgtaaacacatccacgccccagtcgcggagcgtttgaatatgcttattgatcgcagcacggctcatgcccagctgttcgcccagctgctcgccagaatgaaactcgccatcggcaaggataccgatgagagttaacggaatagtattgtccttcacgcaatggtctccacggcattcacttcgcccgttcggccaataaagcgaacttcaggctccagccagacgttgaatttttcgcccacgcgctggcgaacatgatgcgccaggttgacgatatcctcacttgtcgcgttggactggttgatcagtaccagcgcctgctgacgatgaacagcagcgccaccaagagtcgtaccttttaattcacactgatcgataagccagcctgcggccagcttcacgctaccatccgcctgaggataatgcggggccgttggccagccggcgagaaacgcttttgcattttcgctgctgatcactgggtttttgaagaaactgcccgcatttccgtttactttcgggtccgggagcttggtcattcgcatgtggcaaacggaatcaaatacctcacgcggtgtgacggtagccgggtcgagacgggtcagatcgccgtaagtcagaacgggtttccaggctttcgccaggcgcaggccaacggccacaatgacgaaacgatcctgatagtcgtgcttgaaaatgctgtcgcgatagccaaagcggcactgctctgcggtcaggcgcttcgccgttccggtcgcgagttcgatgcagtcgacatattcgcagacgtgtttcagttcgatgccgtaggcaccgatgttttgaataggagatgatcctgcacagcccgggatcagagccaggttttccagccctggcatccctttttcaagggtatattgcaccagatgatgccagttctcgccagcacccacgtgtaaatgccagctgtcagcgctctctttacgctcaatccccatgatgcgattgacgattaccgtccccgcaaaatcatcgagaaacaggacattacttccttcgcccagaataagtacgggttcaccgttttctgttgcgttttgccatgcattcagcaactgctgagcactgtcggcacgtacaatttgattagcattccgttgaataccaaaggtattccagggcttaagggagtgattcatagacgctatcctgatgcaaaaaccgggatagtttaccgtatatatggggggataggtgatttgtttatggaaaggaagcaggtgcaggcttcgcacaggatcagcgggtagttgtccacgcgggagctgaacaccagcgcgtccataccgttcagcgcgctcatcagtttgcgcttgtcggtttcaaacccgtggttcaccacgttagcgccatcaaacggcgagaatttgccaaaggtatgcagctcaattttgtcgccgagcgccatcatgtcgcgcaccagctgctggttggttttgccgtcgtagcgcaggtcatgggcgacgaccgcaattttcggcttaccgggggtaacggctacgggcatcagttcggccaggatcgcttccgttgccacatcaataccgttgttgatgatctggcagcgccctgctccgtacaggctattaaaagcgtccgccacgtgctggcttggggagataaaggtgcagccgagcgagagcatatcgcggaacagctgacgcttaccctcaaccagctgatgcgcgcgatcgaccttcaccggcgggtagttgctgagcgtagggcatttctggcagttatctttccagccttcgcagccgtcggtaaaggcgcaacgtccggtcacgctccagtggtcgtgcagcgtccagacaaatcgggtatccggcttgtgcgccttcaccttgccacaaaacgccaccacctcctccagattcagccagtagctgtgcagcacgtggaagtgcagcacaaccgggccgcgagtgcgggtgacggtgcggtagagattattcaggttgccgaacaggtcgcggttaaacaggcggaacagcgcaatattggcgatggaggtcagacgtggcgtctgcttcagcacctgcggatagttatcatggctgacgcttttcttgccgcctttaccgtaaccgtaaacaaagcgcgactggagtcctttttgcagcgcgcgctggtgcagatccagcgctacgcctgccgccccgccctctgcgaggcgtacgttaaattgcagaatgttcatttaatcaccttcacgcgggctttctcgcccaccaccagcgcgttgtccggaatgctgtccagcaccacgctgcctgcgccaattgtcacgttattgcccacggtaatgtccccgatcatcaccacgttggcgcccagctcgacgttattgccaatcaccgggcaggccaggctgtctggcccgcggttgccgattgtcaccccgtggcgaatggtgaaatcatcacccgcgacgacgaacttgttgatgaccaccgcatagccgtgatgaatggtaaagcggcggccaatggtggcagcggcctgaatttcatagccaaaaaagcattcggtgatgatgcggtacagcaccagcaccggcgcggcccagatattgttcagcacattttttttgtcgccacaccgagcaaaagtgcgcaatacggtaggccagaaccatgcagcacgggcgcaggctccagctgttagcgcggcaatcttccagaaacattatttcccccgaagcccgtcagccagacgcttgccgttacgtaccgacagcagcgtcagcagcgtgcgccagttcatgcgcttattacggatctgatacagggtgaagagctgatacttccggctggcacggtcaaacttgtccttgtgcttgcggtaaaaatggaagtagcccgagaatttcttcggcgacgaggtgatttgcatctccccgtgattgatgtgcaggatctgcgtggcctcttccaccttccacggctcgccgtactccaccaccatccgcaggaagatgtcgtaatcctgcgcggccttcagctcggtatcgaacaggcactccttaaagcgccatgcccaggtaaacacctgattgccgataatgttgcgcttgtagaacaggcggcgggaatacggtgatttcggatacagcggcaggctggccggctgcgaatagacctcgccctggcaaacatagtcattggcatacagaaacgcgtgggtcaccagctgcgctttgtgcgacaggaagatcgacagacggtttggcgtccattcgtcatcgtcgtcgataccggtcagatactgccctttcgcctgcataatcgcctggttgcgcaccgcacacgccccggagttgatggcgttgtgcgtgtacatcacgcgcgggtcgttcaggtcttcaacaaacttttgcagttgttcgtaagaggaggaacagtcatccacgataatcagttcccagttatcgtaatcctgacgcaggaccgatttaatcgcgcggatcgccagctgctgacgattccatgtcggcatatagatagaaatcaaagggcgttgtgtggtcatggtcttccccttatggtgtatccggcactccgaggctttcacgcacccggctgcctttatagatgaaccatatgcggagcgtcccgccatggttttccacgcctgttgggtatgctgacttagccattattccctcctgacgtccaagagcccgctaagcataaacggatcttcattggtgcgcacccggctgtttctttgacatgctctcaacccactggtcgacagcctttcggttgtacatgcattcgctgtttttcttcggcacgccgtccggtgagacgtgaaggtattcccttcctaccatccagcattttttgcgggcccgctcgatagtgcccgggcgaaggccggtaatctcgacgagcttttcttcggttacccagtcgttgggcacgattaaggtcatttcgctcatgggtgtctccaggcaaaaaagaacccggcgcggggccgggcaaaagggatgatgtggcagtgctttcgcacccaatagccagctcataactggctatcagttgcgtcattcgagtttcttcagcagcgagaggtaatcgactaccactgcgccaagtttggaataatcgccaccggacgatttcataaatccatcaattagtccgtttactgtttcgatcaataattcgcgctttttatcctctttcgttttcagaggtcgaaaacacttggaggtgcaaacccctccgactttaccgatttcatcaacgaatgcagccagctcaatgcctcgatcgtcagtgaagtgcgcgtaaattttcacgaccgatccttctgggtgcttgatatgcaactgtggcgtgcttgctgctatctcgcataccgtcccgactggaggcataccatttccatcccagctttgattgttggtgccaatagtgaaattcatattcttcctcatgccgcacgctgggcgcgcagctatctgtatttatcgtgctgaaaattcgccgaagtgagtttcttcacctttttttctggctgctatcgcatcttcttttcgcttgaaatatccaaggcttttcatttttccgtttaccttgatgtgagctcgccactttcctcttctctcctcatatgaaacccctgccacaccagatgtgttgtttgatgcgacggaacgattcatggtgttttggagtggggttacttcgcgtaaattgcagaatctgttgtctcgagggtttctgtttatgtggtctatgtaacttttcggccaacttccagtcatgagaagaaatgcgattcggtgggccttaataagcttcctgtgcacctggatggtgagatacccaagcctgtcagtatttcctgctaaatttccggcagactgatttccccatttgatcttccatctaaactcaccagtttccggattgtaagaaagcagtttttctacctcctcacgagtgatatctggcatcacatccccctctgctnnnnnnnnnnnnnnnnnnnnnnnnnnnnnnnnnnnnnnnnnnnnnnnnnnnnnnnnnnnnnnnnnnnnnnnnnnnnnnnnnnnnnnnnnnnnnnnnnnnnnnnnnnnnnnnnnnnnnnnnnnnnnnnnnnnnnnnnnnnnnnnnnnnnnnnnnnnnnnnnnnnnnnnnnnnnnnnnnnnnnnnnnnnnnnnnnnnnnnnnnnnnnnnnnnnnnnnnnnnnnnnnnnnnnnnnnnnnnnnnnnnnnnnnnnnnnnnnnnnnnnnnnnnnnnnnnnnnnnnnnnnnnnnnnnnnnnnnnnnnnnnnnnnnnnnnnnnnnnnnnnnnnnnnnnnnnnnnnnnnnnnnnnnnnnnnnnnnnnnnnnnnnnnnnnnnnnnnnnnnnnnnnnnnnnnnnnnnnnnnnnnnnnnnnnnnnnnnnnnnnnnnnnnnnnnnnnnnnnnnnnnnnnnnnnnnnnnnnnnnnnnnnnnnnnnnnnnnnnnnnnnnnnnnnnnnnnnnnnnnnnnnnnnnnnnnnnnnnnnnnnnnnnnnnnnnnnnnnnnnnnnnnnnnnnnnnnnnnnnnnnnnnnnnnnnnnnnnnnnnnnnnnnnnnnnnnnnnnnnnnnnnnnnnnnnnnnnnnnnnnnnnnnnnnnnnnnnnnnnnnnnnnnnnnnnnnnnnnnnnnnnnnnnnnnnnnnnnnnnnnnnnnnnnnnnnnnnnnnnnnnnnnnnnnnnnnnnnnnnnnnnnnnnnnnnnnnnnnnnnnnnnnnnnnnnnnnnnnnnnnnnnnnnnnnnnnnnnnnnnnnnnnnnnnnnnnnnnnnnnnnnnnnnnnnnnnnnnnnnnnnnnnnnnnnnnnnnnnnnnnnnnnnnnnnnnnnnnnnnnnnnnnnnnnnnnnnnnnnnnnnnnnnnnnnnnnnnnnnnnnnnnnnnnnnnnnnnnnnnnnnnnnnnnnnnnnnnnnnnnnnnnnnnnnnnnnnnnnnnnnnnnnnnnnnnnnnnnnnnnnnnnnnnnnnnnnnnnnnnnnnnnnnnnnnnnnnnnnnnnnnnnnnnnnnnnnnnnnnnnnnnnnnnnnnnnnnnnnnnnnnnnnnnnnnnnnnnnnnnnnnnnnnnnnnnnnnnnnnnnnnnnnnnnnnnnnnnnnnnnnnnnnnnnnnnnnnnnnnnnnnnnnnnnnnnnnnnnnnnnnnnnnnnnnnnnnnnnnnnnnnnnnnnnnnnnnnnnnnnnnnnnnnnnnnnnnnnnnnnnnnnnnnnnnnnnnnnnnnnnnnnnnnnnnnnnnnnnnnnnnnnnnnnnnnnnnnnnnnnnnnnnnnnnnnnnnnnnnnnnnnnnnnnnnnnnnnnnnnnnnnnnnnnnnnnnnnnnnnnnnnnnnnnnnnnnnnnnnnnnnnnnnnnnnnnnnnnnnnnnnnnnnnnnnnnnnnnnnnnnnnnnnnnnnnnnnnnnnnnnnnnnnnnnnnnnnnnnnnnnnnnnnnnnnnnnnnnnnnnnnnnnnnnnnnnnnnnnnnnnnnnnnnnnnnnnnnnnnnnnnnnnnnnnnnnnnnnnnnnnnnnnnnnnnnnnnnnnnnnnnnnnnnnnnnnnnnnnnnnnnnnnnnnnnnnnnnnnnnnnnnnnnnnnnnnnnnnnnnnnnnnnnnnnnnnnnnnnnnnnnnnnnnnnnnnnnnnnnnnnnnnnnnnnnnnnnnnnnnnnnnnnnnnnnnnnnnnnnnnnnnnnnnnnnnnnnnnnnnnnnnnnnnnnnnnnnnnnnnnnnnnnnnnnnnnnnnnnnnnnnnnnnnnnnnnnnnnnnnnnnnnnnnnnnnnnnnnnnnnnnnnnnnnnnnnnnnnnnnnnnnnnnnnnnnnnnnnnnnnnnnnnnnnnnnnnnnnnnnnnnnnnnnnnnnnnnnnnnnnnnnnnnnnnnnnnnnnnnnnnnnnnnnnnnnnnnnnnnnnnnnnnnnnnnnnnnnnnnnnnnnnnnnnnnnnnnnnnnnnctttttcggtgttcacacagattccaccccagcgcgaaatcaggaagaagtcttccatctcagaggagcccgcattgtttgccagatcctcaatcatctgtacgatatcgacgattgagtggtcagccattagccgctgaacggcgtagccgaaggcattgatcatcaccgcgtggaactgaatgtagtcacgcttgtagtctgcctggctggtgccgtggcgaatcgcttcgatctgcgtcagggccaaccaggcctcccagatggattcgatgttgcccatttccagcggcttactgcccacgttggcaaacttggccgtcgcgtcgctcagcgctttgaagctcacccaaagcttacttttcgccggaacgacgttgtgctcgaagtctgtcacctctgcaaaggtgtcgtgctgagacaggtacgtcaccatcccctgtgcaacttcattacgcccgtcataggccatgttgatcgcagcggaaggtttcgagacgttgttattgatatcggagaagaactgctggcgtgccttcagtgggagattatgggtcagcatcagcgggatgctgattggctctccgtaagtccggcagaactcagctaacccggcggcgcggtgctggccgtcgaacagcttgatcactgcatccatagggaagcgtgcgacgcccacattcgtattgccgaactcttcaaactcaatatctgcgtcgcagttgccgaccagcggcgggatgatgaagggctctttattttggtatgcattgacgaggtactggtaaaacttcttcacgcgcgcctggttaatttcgcgttgagagcgctcgagcgtgctgccgtgattgtcggacgcaagtatgcgcgttagcgcgcgagcaggcgccgtgatcatgtaagtcgccgtgctaccctgcatgccgcgcgacgccgggaactcaaagaaataatcgcctactttgctcatgccgcctcctgcctttcccgatattcctcagcgagccgcagcgcctttaatggattgctgaccatttcaccccatggcattagcaagccgttaccaatgaaggggaggcacagagtgccaaccatgatgtcgtcgtgagcgtgagtcataggatggactccatttcgtcgatgtacaggccctgagcaatcaggcggctacggcgggcggcacgttcaatgcactccttccgtctgccttcctgcgattgctctatggcgcgccgggtgaacagccgcgatttaccctgcggggttacaacctttggcttgctggccaggctaaatttccggtcgcagatgccgtcctcgttgatccatttttccgattcaacgatctgcgctatctgcccggcgccgcgggtaatgccgttggccacccggttaaactcaatgagcgttacgccaaacttttcagcgatttcgctaccggtcaccgggcggccgcgcgtttgaatcatccagataacgcgttcacggaggcctgagaattgcccagttcgcccgggcctgcggtagaagggtgtgcgtttcatggctccacctacttgatgatgagtgaaggtttgccgagttttatttgcgcgccaggtacatccacgccagcttctatttggtgtttgatagccaatttgtctggcttgatgctagtctcgtattcgacgaattccggaggaagcgcgctggcatccgtgatttcaacagacttagacggcgcgcgaaccgttacctgatgaatgcctgccttaagtgatttcttccctgctgtatcgagggaggcggccacataatctttcatgctcgccacacggttttctgcggcttttgcgcgctctgcaagtcgcttgctttcttctttcngagcctcggcataagcagnnnnnnnnnnnnnnnnnnnnnnnnnnnnnnnnnnnnnnnnnnnnnnnnnnnnnnnnnnnnnnnnnnnnnnnnnnnnnnnnnnnnnnnnnnnnnnnnnnnnnnnnnnnnnnnnnnnnnnnnnnnnnnnnnnnnnnnnnnnnnnnnnnnnnnnnnnnnnnnnnnnnnnnnnnnnnnnnnnnnnnnnnnnnnnnnnnnnnnnnnnnnnnnnnnnnnnnnnnnnnnnnnnnnnnnnnnnnnnnnnnnnnnnnnnnnnnnnnnnnnnnnnnnnnnnnnnnnnnnnnnnnnnnnnnnnnnnnnnnnnnnnnnnnnnnnnnnnnnnnnnnnnnnnnnnnnnnnnnnnnnnnnnnnnnnnnnnnnnnnnnnnnnnnnnnnnnnnnnnnnnnnnnnnnnnnnnnnnnnnnnnnnnnnnnnnnnnnnnnnnnnnnnnnnnnnnnnnnnnnnnnnnnnnnnnnnnnnnnnnnnnnnnnnnnnnnnnnnnnnnnnnnnnnnnnnnnnnnnnnnnnnnnnnnnnnnnnnnnnnnnnnnnnnnnnnnnnnnnnnnnnnnnnnnnnnnnnnnnnnnnnnnnnnnnnnnnnnnnnnnnnnnnnnnnnnnnnnnnnnnnnnnnnnnnnnnnnnnnnnnnnnnnnnnnnnnnnnnnnnnnnnnnnnnnnnnnnnnnnnnnnnnnnnnnnnnnnnnnnnnnnnnnnnnnnnnnnnnnnnnnnnnnnnnnnnnnnnnnnnnnnnnnnnnnnnnnnnnnnnnnnnnnnnnnnnnnnnnnnnnnnnnnnnnnnnnnnnnnnnnnnnnnnnnnnnnnnnnnnnnnnnnnnnnnnnnnnnnnnnnnnnnnnnnnnnnnnnnnnnnnnnnnnnnnnnnnnnnnnnnnnnnnnnnnnnnnnnnnnnnnnnnnnnnnnnnnnnnnnnnnnnnnnnnnnnnnnnnnnnnnnnnnnnnnnnnnnnnnnnnnnnnnnnnnnnnnnnnnnnnnnnnnnnnnnnnnnnnnnnnnnnnnnnnnnnnnnnnnnnnnnnnnnnnnnnnnnnnnnnnnnnnnnnnnnnnnnnnnnnnnnnnnnnnnnnnnnnnnnnnnnnnnnnnnnnnnnnnnnnnnnnnnnnnnnnnnnnnnnnnnnnnnnnnnnnnnnnnnnnnnnnnnnnnnnnnnnnnnnnnnnnnnnnnnnnnnnnnnnnnnnnnnnnnnnnnnnnnnnnnnnnnnnnnnnnnnnnnnnnnnnnnnnnnnnnnnnnnnnnnnnnnnnnnnnnnnnnnnnnnnnnnnnnnnnnnnnnnnnnnnnnnnnnnnnnnnnnnnnnnnnnnnnnnnnnnnnnnnnnnnnnnnnnnnnnnnnnnnnnnnnnnnnnnnnnnnnnnnnnnnnnnnnnnnnnnnnnnnnnnnnnnnnnnnnnnnnnnnnnnnnnnnnnnnnnnnnnnnnnnnnnnnnnnnnnnnnnnnnnnnnnnnnnnnnnnnnnnnnnnnnnnnnnnnnnnnnnnnnnnnnnnnnnnnnnnnnnnnnnnnnnnnnnnnnnnnnnnnnnnnnnnnnnnnnnnnnnnnnnnnnnnnnnnnnnnnnnnnnnnnnnnnnnnnnnnnnnnnnnnnnnnnnnnnnnnnnnnnnnnnnnnnnnnnnnnnnnnnnnnnnnnnnnnnnnnnnnnnnnnnnnnnnnnnnnnnnnnnnnnnnnnnnnnnnnnnnnnnnnnnnnnnnnnnnnnnnnnnnnnnnnnnnnnnnnnnnnnnnnnnnnnnnnnnnnnnnnnnnnnnnnnnnnnnnnnnnnnnnnnnnnnnnnnnnnnnnnnnnnnnnnnnnnnnnnnnnnnnnnnnnnnnnnnnnnnnnnnnnnnnnnnnnnnnnnnnnnnnnnnnnnnnnnnnnnnnnnnnnnnnnnnnnnnnnnnnnnnnnnnnnnnnnnnnnnnnnnnnnnnnnnnnnnnnnnnnnnnnnnnnnnnnnnnnnnnnnnnnnnnnnnnnnnnnnnnnnnnnnnnnnnnnnnnnnnnnnnnnnnnnnnnnnnnnnnnnnnnnnnnnnnnnnnnnnnnnnnnnnnnnnnnnnnnnnnnnnnnnnnnnnnnnnnnnnnnnnnnnnnnnnnnnnnnnnnnnnnnnnnnnnnnnnnnnnnnnnnnnnnnnnnnncgacaagctggaacggtaccggaaggaaacgggaaacgtgataggtaagggtgtgaacagggatgctgcggagttcgtgaggaaagggcaataaaaaacccggcactgtggccgggcgtatgtctatgcggctaatcttgcgatccaagcctcgcgcttagcaaacggaagaatatggctagattcattaaataacagtgacagttgttgcatttggtcagcaattgaatcgctatcgatgatgacatacctattattcaatgcatcattagcatttttgagatcgatcaacttaccaagtagcgagtaagcactgttccaactccccccacattttacacttgaggtgaagatgtattttggctcatcagtattaattgttaccgggatcgtaatctgatgtccactcaagccaataacattctcacgaagagagataatatctttcaaatcagtatgataaagatagtttatcacaatgctttcgaacttttctgcatgaacaggttgatgccagtcaagagaaactgacgatgccagaattccagcacgtattatatctgaggtgacatttccaatcgtttgctctgtagcccatccaataatttcaccacgctcattcagttcggcgccttctttgcgaagaagagttcggatttcatcaatgcgttttttagtgagagatatccccctggactccatgttcataagggcatcacatcgatcgctaactaaaaacttgccattaatctcacggacaaaggcgccaacatgctccccatcgtcacaatatgtgaatgggctgataattctcatggtttcacctatattgtggcattcgaaaccaagctttgaaatcaccgttgagcacatcataatccaagccctatctgtcctgattcgtcctctaatggaagtggtaatttgcctaagcaagttacgtttaaccttttacaaaagtattcccaatacccagataagtcatctggctttatgctatctactattggaaaacctatcctctcactatagtatcctgcctcttcatagtacacgtggaagtgagctccgaaaacagtatcttggtaatctggcctgtctattttgtagttattcttgtgcttatcaaaaggatatgtgtctacagcaaaaactctttttttgttgtacagcgcgacaatgttgattttggggtatgaagatccagtaatttccagtgagtcgtgatctggcttccactggagaagaaaagacaatccttgaattggtatcccgtcattatcttcagggattacttgcatttgtagccacataagtggtcgatttggcgggggtttgtttccccatctaacgccagagaagttgactgttttatcgcaatatagaacatgatcaacctctttctggctaggcaagtaatcgtcagttttagccactgttaaaatatccgttttatagcaaaaattaataattattgagctatacaacccactctgacactacagcaaatcacccaaacgtctcatcaggccaccataagcacgatcgcaacaaccgagagcaaagtaaccacgcctactatcagatattctcttatcacccaaacacctcatcaggccactgctacagtttgttgtaagctatcgattcatggatcagcgcttttcccatgatgtagagctggtcctgattctcttctgttacataccagtctttgtaagccgggttatctgaaagcacggctaattgcaggccctgcatttgcagacgcttaacatggaagtgctgcccaaagacaaatgcgtatactccgtcaaccttgaagttcctcactgacacatcgaagaagaggcgatcaccagactgaatcgttggacacatactgtcaccgtctacagtcatcaccttcacatcatgctgtgcgcgattgccgaagagggcgcgggcatgctcatttgtgaactcaatagcatgcagaacttctacaaactcagaaatcatgaatgatcccggtcccgcactaacagtgaggtcgagaacgtctacgcggaatacgtccgaagctgcattagttaataaagctgcccctgattgctttccgtcattaagcatcgccccttctccagagctgagccaatcaggcattaccccgagcgcgttagctatttccacaagcttggtggtctggctggcttttcctgtttcaattttctgaatagccgcctggctaacacccacgagatccccgagcgccttttgtgtcaggcctcgtgccgcgcgtgcttctttcagtcttccagcaagtgtcgttttcataaggttaaatgtacaaccgtggttttattccatcaaacgaaaatggttgttgagtaaatacaaccatagttttattcttcgtttatattcactatggaggttgttatgaacccaaccattaaaaccgctatcaccatcgtcgggtcacaaaaaagcccttggtgaagcgtgcgcagtgtcgcagcaggcggtttacaagtnnnnnnnnnnnnnnnnnnnnnnnnnnnnnnnnnnnnnnnnnnnnnnnnnnnnnnnnnnnnnnnnnnnnnnnnnnnnnnnnnnnnnnnnnnnnnnnnnnnnnnnnnnnnnnnnnnnnnnnnnnnnnnnnnnnnnnnnnnnnnnnnnnnnnnnnnnnnnnnnnnnnnnnnnnnnnnnnnnnnnnnnnnnnnnnnnnnnnnnnnnnnnnnnnnnnnnnnnnnnnnnnnnnnnnnnnnnnnnnnnnnnnnnnnnnnnnnnnnnnnnnnnnnnnnnnnnnnnnnnnnnnnnnnnnnnnnnnnnnnnnnnnnnnnnnnnnnnnnnnnnnnnnnnnnnnnnnnnnnnnnnnnnnnnnnnnnnnnnnnnnnnnnnnnnnnnnnnnnnnnnnnnnnnnnnnnnnnnnnnnnnnnnnnnnnnnnnnnnnnnnnnnnnnnnnnnnnnnnnnnnnnnnnnnnnnnnnnnnnnnnnnnnnnnnnnnnnnnnnnnnnnnnnnnnnnnnnnnnnnnnnnnnnnnnnnnnnnnnnnnnnnnnnnnnnnnnnnnnnnnnnnnnnnnnnnnnnnnnnnnnnnnnnnnnnnnnnnnnnnnnnnnnnnnnnnnnnnnnnnnnnnnnnnnnnnnnnnnnnnnnnnnnnnnnnnnnnnnnnnnnnnnnnnnnnnnnnnnnnnnnnnnnnnnnnnnnnnnnnnnnnnnnnnnnnnnnnnnnnnnnnnnnnnnnnnnnnnnnnnnnnnnnnnnnnnnnnnnnnnnnnnnnnnnnnnnnnnnnnnnnnnnnnnnnnnnnnnnnnnnnnnnnnnnnnnnnnnnnnnnnnnnnnnnnnnnnnnnnnnnnnnnnnnnnnnnnnnnnnnnnnnnnnnnnnnnnnnnnnnnnnnnnnnnnnnnnnnnnnnnnnnnnnnnnnnnnnnnnnnnnnnnnnnnnnnnnnnnnnnnnnnnnnnnnnnnnnnnnnnnnnnnnnnnnnnnnnnnnnnnnnnnnnnnnnnnnnnnnnnnnnnnnnnnnnnnnnnnnnnnnnnnnnnnnnnnnnnnnnnnnnnnnnnnnnnnnnnnnnnnnnnnnnnnnnnnnnnnnnnnnnnnnnnnnnnnnnnnnnnnnnnnnnnnnnnnnnnnnnnnnnnnnnnnnnnnnnnnnnnnnnnnnnnnnnnnnnnnnnnnnnnnnnnnnnnnnnnnnnnnnnnnnnnnnnnnnnnnnnnnnnnnnnnnnnnnnnnnnnnnnnnnnnnnnnnnnnnnnnnnnnnnnnnnnnnnnnnnnnnnnnnnnnnnnnnnnnnnnnnnnnnnnnnnnnnnnnnnnnnnnnnnnnnnnnnnnnnnnnnnnnnnnnnnnnnnnnnnnnnnnnnnnnnnnnnnnnnnnnnnnnnnnnnnnnnnnnnnnnnnnnnnnnnnnnnnnnnnnnnnnnnnnnnnnnnnnnnnnnnnnnnnnnnnnnnnnnnnnnnnnnnnnnnnnnnnnnnnnnnnnnnnnnnnnnnnnnnnnnnnnnnnnnnnnnnnnnnnnnnnnnnnnnnnnnnnnnnnnnnnnnnnnnnnnnnnnnnnnnnnnnnnnnnnnnnnnnnnnnnnnnnnnnnnnnnnnnnnnnnnnnnnnnnnnnnnnnnnnnnnnnnnnnnnnnnnnnnnnnnnnnnnnnnnnnnnnnnnnnnnnnnnnnnnnnnnnnnnnnnnnnnnnnnnnnnnnnnnnnnnnnnnttcaggcctaccagattcgccctgatttgccgacgctgttcccgtcaccggccgacaataacgccgcctaaccggcggccctaacaacgaaagggaaagcaatgcattcacttgcgtatcaacacaataccggattcatggcgagtccgatgatttcgataaatcaaagcgttccgcgaaataccagtaagctcactcgtattcgcgaagctgttcgcgcctggcagaaggcaacgcctgggaaggctcagatccacatttcgcagttggtagccaaagagtggctggcgcgcggcgggaaggggttgttactggcaggttctgaacacaacacgaagcagaacttcttccggatgattaacgatccgggcccgaagaacgacaaagggttgatgctgctgatccccgtcattgtcgacgtgatggcgcgggataacgagaaagtggcgagagagtttggtctggtcgcaaagactgaggccgaactgatagcagaggctatgaaagagtgcactgaagcgcatcaggcgaagttacttggtcagccgatacaacgccttgagaaagaggtgagagaagccgctgaagcactgctgcgtttcctgcctactgaatcaatcgccgcggtagtaacaagtctggccgctatggcgccgggggttatgtgatgggaagtttcaaaaatggcgaaagccagtctgcgcgaacagaactggccttcaaatgcaaatcgtgtgcactcattgcaggaggaataatggcaaaaaatccacgctattaccataccgctgtacataaaaacataacccgcgaccgcttcatccgctcggttaacccgattgtggcagagaagatgcgcgccatcctggaagaactgaaacgtaaggagagtggccgtgggtaacgtatctaatttagccgaagccagagaggccagaaggctccagaaaccgcgcacgaatgacggtaaggggtttgccttgctgcaccgtaaaattatggatgtgccgttctacaaggacgctgaggcggctcatttatgggttcacctgctcctgcgcgctaatcacgaacagacactggtatcgactgatgttggcgatgtgatctgcgagcgcggcgagttcatcaccgggcgtaacacgctggcaatggaaacgggtttgaccgctgatcgcgttaaatcactgctccgtaaattccagaatctgggcatgatcaccaccaaatcgaacaaccgttttactgttctaaaagtggtcaaatatgacgaatatcagtcaaatttttgtccagccgatgtccagccagtgtccagcgcaaacgcagtagtaccaatgcctgtggaggatgtgtgtccagccgatgtccagccagtgtccacagataacaatatattaaataactctcttactaacgtaagagagtgtgcatcagcagcagaaaaaccagagcagaaaaaaccttctctcannnnnnnnnnnnnnnnnnnnnnnnnnnnnnnnnnnnnnnnnnnnnnnnnnnnnnnnnnnnnnnnnnnnnnnnnnnnnnnnnnnnnnnnnnnnnnnnnnnnnnnnnnnnnnnnnnnnnnnnnnnnnnnnnnnnnnnnnnnnnnnnnnnnnnnnnnnnnnnnnnnnnnnnnnnnnnnnnnnnnnnnnnnnnnnnnnnnnnnnnnnnnnnnnnnnnnnnnnnnnnnnnnnnnnnnnnnnnnnnnnnnnnnnnnnnnnnnnnnnnnnnnnnnnnnnnnnnnnnnnnnnnnnnnnnnnnnnnnnnnnggctgctggcgccgaaaggtctggttaaaggctctctgttcgtgattggcgcaaggccaaagatgggcaagacaaccctgtacgggcagatggcgatcaactgcgcggttcgtgaggaaaagccagcgctgatgttcagcctcgaaatgcctggagaccagatccttgaaaagctggttggtcagaagtcgggcattaacccgagcattttttacatgcccgctacggatgacgcggatgaccagtaccagggtgactacgacggcgactttaagaaggcgatcgccacagccggtcggctaagtgaaatcgacatgctgtacatcgacgacactccgggcctgtccctggcgcatatcgttgccgaatgccgtcgaattaagcgcgagaaaggctgcgtaggcatgattctggttgactacctgacgctgatgaccgccgaaaaagccgaccgtaatgacctggcgtacgggatgatcaccaaagggcttaagaacctcgccaaagagcttggctgcgtcgtcgtgctgctgacccagctcaaccgtgaactggagaagcgagtgaataaacgcccgttgccgagtgattcccgcgacacaggacagattgagcaggactgcgactactgggttggcatccaccgggaaggtgctttcgatgacagcgtgccgccgggcgaaaccgagttaatcctgcgactcaaccgccacggcagtaccggaacggtttattgcaatcagattaacggggcaatttacgacacagaccagcaggccgccgccgcagaacgccgcgggcgtgagcagcagccgaaaaagaaaggggggttctgatgaccataacaatccgtgggcagattcttgcagccctgcgtaataacccgggcctgaacagcgctcgtattgccagcatgatcggcatgaccaccaaaaagatttccggcccgctaagcacgttgtttgcagacggccttatcgagttcgaaggtaagcatggccagcggctgtatcggctgaccagctacggaatgaaatacgcaccggnnnnnnnnnnnnnnnnnnnnnnnnnnnnnnnnnnnnnnnnnnnnnnnnnnnnnnnnnnnnnnnnnnnnnnnnnnnnnnnnnnnnnnnnnnnnnnnnnnnnnnnnnnnnnnnnnnnnnnnnnnnnnnnnnnnnnnnnnnnnnnnnnnnnnnnnnnnnnnnnnnnnnnnnnnnnnnnnnnnnnnnnnnnnnnnnnnnnnnnnnnnnnnnnnnnnnnnnnnnnnnnnnnnnnnnnnnnnnnnnnnnnnnnnnnnnnnnnnnnnnnnnnnnnnnnnnnnnnnnnnnnnnnnnnnnnnnnnnnnnnnnnnnnnnnnnnnnnnnnnnnnnnnnnnnnnnnnnnnnnnnnnnnnnnnnnnnnnnnnnnnnnnnnnnnnnnnnnnnnnnnnnnnnnnnnnnnnnnnnnnnnnnnnnnnnnnnnnnnnnnnnnnnnnnnnnnnnnnnnnnnnnnnnnnnnnnnnnnnnnnnnnnnnnnnnnnnnnnnnnnnnnnnnnnnnnnnnnnnnnnnnnnnnnnnnnnnnnnnnnnnnnnnnnnnnnnnnnnnnnnnnnnnnnnnnnnnnnnnnnnnnnnnnnnnnnnnnnnnnnnnnnnnnnnnnnnnnnnnnnnnnnnnnnnnnnnnnnnnnnnnnnnnnnnnnnnnnnnnnnnnnnnnnnnnnnnnnnnnnnnnnnnnnnnnnnnnnnnnnnnnnnnnnnnnnnnnnnnnnnnnnnnnnnnnnnnnnnnnnnnnnnnnnnnnnnnnnnnnnnnnnnnnnnnnnnnnnnnnnnnnnnnnnnnnnnnnnnnnnnnnnnnnnnnnnnnnnnnnnnnnnnnnnnnnnnnnnnnnnnnnnnnnnnnnnnnnnnnnnnnnnnnnnnnnnnnnnnnnnnnnnnnnnnnnnnnnnnnnnnnnnnnnnnnnnnnnnnnnnnnnnnnnnnnnnnnnnnnnnnnnnnnnnnnnnnnnnnnnnnnnnnnnnnnnnnnnnnnnnnnnnnnnnnnnnnnnnnnnnnnnnnnnnnnnnnnnnnnnnnnnnnnnnnnnnnnnnnnnnnnnnnnnnnnnnnnnnnnnnnnnnnnnnnnnnnnnnnnnnnnnnnnnnnnnnnnnnnnnnnnnnnnnnnnnnnnnnnnnnnnnnnnnnnnnnnnnnnnnnnnnnnnnnnnnnnnnnnnnnnnnnnnnnnnnnnnnnnnnnnnnnnnnnnnnnnnnnnnnnnnnnnnnnnnnnnnnnnnnnnnnnnnnnnnnnnnnnnnnnnnnnnnnnnnnnnnnnnnnnnnnnnnnnnnnnnnnnnnnnnnnnnnnnnnnnnnnnnnnnnnnnnnnnnnnnnnnnnnnnnnnnnnnnnnnnnnnnnnnnnnnnnnnnnnnnnnnnnnnnnnnnnnnnnnnnnnnnnnnnnnnnnnnnnnnnnnnnnnnnnnnnnnnnnnnnnnnnnnnnnnnnnnnnnnnnnnnnnnnnnnnnnnnnnnnnnnnnnnnnnnnnnnnnnaaaagcggattgctgggctatcacaccatctccggtgcgcgcacggttttatcgagcatacagaggcgtttggccacgaagcatcaaacgggattctgtgttgtggtgacgcgcagtggaacattgattcgtctaagtcggctctggccgcagccggtaaaggagaggcataatgagcacccttaccaaaaaatggctccagcagacaatcgctgagcttgaagaagagcgcgatgctgtgcccggcgttgtaaacgaagatgcagcccgggcgctggcggcgatgaagctagcgctggcatcgctcgaagcggagcctgtggcggaatggacaaacgagcagtgcatggagttcctgtctatcgctttccggcatgcagaaattaacggcgaccttcagctggacgatatccgcctgggtgtgaagatggttaatggtagccgcgccgccatgcttcagggtgccgaacctgtaacgacggcttacaagttgcctgaaccaatcaaagacaatcgcctcaattcctgggaggaggctgatgattactattctggctattaggccgggtggaatgaatgccttgaaactgtgcaagtgatttatgagggcaaaccagatgcaaaatgaacgaattttttacatggataaagctgttgatttgttcaactcgctgcgagaagagaaggtttcagagcgcattgataacgctcatcttggagctatgggggcggttaacgttcaggtgtggacatctgtcttgggcgggacgttgcaatacgaaacttcaaacggcggatgcaccttgcgcgttattccagcagcaccgcaacaggaggataaatgactccactactctgcccattttgcgaatcgacagcgcttagcattggatactcattcagttttcttggaaagaaacgctacgtctcatgcagatgtggcgctcaagggccagagaaacgcaccaaatctgaagcaatttctgcatggaatagccgaatgaaggtgtggttttacagccccgaaacgctgacatgtgctggcgagcgcaggagaactgcggcttacattgatagccttaagaaagatggatttatgcctgagctaattgcagcaccgcagcaggaggttaagtgatggacgagctcaaaaatttcagcgcgactgactggttatttttcgcaacgatggtgatcgcatggttttacctggcagccaaagcgtatggctggtttattggttttctgtttcgccgttgttggcgctggtggaaccggaaagacgagaaaaccctagctatggattcgttttacgaggcttttgatctggctgatatcaatcctggggatagcatggcgatcaccacccatagtggaatgacgatccgcattcatcggcccgaggctaagcgcgatgtaaaaccgctttgacgcacaaaattcaggcctcttcggaggcctttctcttcagttgattttgttgaatcaaccgtccatactttctttgctgacggcctgaacacccgtcagtgacttctgcgcatttaaggggacttaaatgcgaccacaatctgaactcctcaccctgtcacagatgcttaacggcacctgcgattttctgcattctgcggtttccgttaaggaggccgtatgactctgccagtagacggtatcaaactccatcgcggcaacttcgcggccataggacagcaaattcagccattgctggatgcaggccagtgcttccgccttcaggtcaagccgtggcgcgagaagcgcagcctgtctcaaaacgcactctttcatctttggatgggagaaatcagcgaatacctcatcaaatccgggcgtaccgacgcaacgccggaatgggttaagcgcaacctcaaaaagacgtacctcggctgcgaagaagtcacctataccgnnnnnnnnnnnnnnnnnnnnnnnnnnnnnnnnnnnnnnnnnnnnnnnnnnnnnnnnnnnnnnnnnnnnnnnnnnnnnnnnnnnnnnnnnnnnnnnnnnnnnnnnnnnnnnnnnnnnnnnnnnnnnnnnnnnnnnnnnnnnnnnnnnnnnnnnnnnnnnnnnnnnnnnnnnnnnnnnnnnnnnnnnnnnnnnnnnnnnnnnnnnnnnnnnnnnnnnnnnnnnnnnnnnnnnnnnnnnnnnnnnnnnnnnnnnnnnnnnnnnnnnnnnnnnnnnnnnnnnnnnnnnnnnnnnnnnnnnnnnnnnnnnnnnnnnnnnnnnnnnnnnnnnnnnnnnnnnnnnnnnnnnnnnnnnnnnnnnnnnnnnnnnnnnnnnnnnnnnnnnnnnnnnnnnnnnnnnnnnnnnnnnnnnnnnnnnnnnnnnnnnnnnnnnnnnnnnnnnnnnnnnnnnnnnnnnnnnnnnnnnnnnnnnnnnnnnnnnnnnnnnnnnnnnnnnnnnnnnnnnnnnnnnnnnnnnnnnnnnnnnnnnnnnnnnnnnnnnnnnnnnnnnnnnnnnnnnnnnnnnnnnnnnnnnnnnnnnnnnnnnnnnnnnnnnnnnnnnnnnnnnnnnnnnnnnnnnnnnnnnnnnnnnnnnnnnnnnnnnnnnnnnnnnnnnnnnnnnnnnnnnnnnnnnnnnnnnnnnnnnnnnnnnnnnnnnnnnnnnnnnnnnnnnnnnnnnnnnnnnnnnnnnnnnnnnnnnnnnnnnnnnnnnnnnnnnnnnnnnnnnnnnnnnnnnnnnnnnnnnnnnnnnnnnnnnnnnnnnnnnnnnnnnnnnnnnnnnnnnnnnnnnnnnnnnnnnnnnnnnnnnnnnnnnnnnnnnnnnnnnnnnnnnnnnnnnnnnnnnnnnnnnnnnnnnnnnnnnnnnnnnnnnnnnnnnnnnnnnnnnnnnnnnnnnnnnnnnnnnnnnnnnnnnnnnnnnnnnnnnnnnnnnnnnnnnnnnnnnnnnnnnnnnnnnnnnnnnnnnnnnnnnnnnnnnnnnnnnnnnnnnnnnnnnnnnnnnnnnnnnnnnnnnnnnnnnnnnnnnnnnnnnnnnnnnnnnnnnnnnnnnnnnnnnnnnnnnnnnnnnnnnnnnnnnnnnnnnnnnnnnnnnnnnnnnnnnnnnnnnnnnnnnnnnnnnnnnnnnnnnnnnnnnnnnnnnnnnnnnnnnnnnnnnnnnnnnnnnnnnnnnnnnnnnnnnnnnnnnnnnnnnnnnnnnnnnnnnnnnnnnnnnnnnnnnnnnnnnnnnnnnnnnnnnnnnnnnnnnnnnnnnnnnnnnnnnnnnnnnnnnnnnnnnnnnnnnnnnnnnnnnnnnnnnnnnnnnnnnnnnnnnnnnnnnnnnnnnnnnnnnnnnnnnnnnnnnnnnnnnnnnnnnnnnnnaacgttaggtttgagcaccaggtggcgatcactcagtgggcgtgggcggagttccaggagcagctcggcgcgaagaaggtggcgggcaagacgatggagcgcctgaagaagctaatctggctggcggcgcaggacgtcaaaagggagttggcgggccgtgagacttacgaatatcagaagatggcggaactggtcggtgtaacgccaaagaactggtccgagacgtttacggagcgctgggtggagatgaggcgtatcttccaacgcctggatagcggtgctttgttgcaggttacgcgatcacgttcacaacaaaaggcgacaaatttagatttgagaggatataagtaatggaccaagaaactcttaaatctattctaaagtacgacgccttttctggtttgttttcatgggcagtgaaaaggcagaaggtggttgtaggaagcgttgctggaagcaaaaattctcttggctatgtgcaaataaaaatttctgggaaactttatcatgctcatcgccttgcatggctctacgtgtacggatatatgccagaaaaagagatcgatcacataaacagaataagagacgacaacaggattgccaatcttagagaagcaaccagccaacttaactctcttaacactggtatctataaaaataacacatcaggtagcaagggtatttattacaacaaaagagcaaaaaagtggcaggcacagattctcatcgatggaaaacgggagtatttaggtctctatgatgatttaaaaagagccgatatagcatttagacttgctaatcacttcagacttgcaaaactggattgaaacgcatatatttcatgtaaatctgatatcgtcgccatagcttcgtaggtcgacaaagaattaagagcccgaggttaaagccttgggcttttttatttccaaatttcacaagcgcaccgcaatgcgctttcaactacgtcgaatccaaaaccctttgaaatgagcctttgaggaagtcagttagtgctggcgagcctcgacgggctgatttcctatgcgacaaaggttcatctcaaagaaggcaaacgccatgttaaaagatccttccaaggaagagattgaaaaatacttcttttgcgacccagatgtcgggagcattgtcaggatagccaactcaagtacagcaaaggccggggaaaacccaatttatgttaacaagtgtggttaccacatggtcagcgctctgggtcaggtgattggcctacaccgaatagtttggatcgtggcgaagggatctatccctgaaggtatggaaattgaccatatcaacggcgacaagagcgacaatagaattacaaatctgcgcctttgtacgccaacacagaacaggcaaaacaagaccaaatataaaaacaacaaatctggctttaaggggtgtccatttcgaatcctctccacggattaaaagaccatggcgagcaaggattgttgttaataaaaaggctatcagcttgggaaactttatgaccaagcatgaggctcatgaggcctatcaagaagcagccaaaaaatactttggcgaattcaacaggtcataacttcaggccgcagacaatcaattccagatgccacttagctatcgtgtctgacggcctttccccactacacaaacagctacccgttttcggaggtgatatggctaaacgtatgcaagataaagaaagcattgccggagtgtcatggctgattgtccttgccctgtcatgctggggcggcctggtccgataccttattgacgtgaagcagaacaaagccacctggagctggatcaatgcactggcgcaaatcgcagtgtccggttttaccggtctcattggtggcctgatcagcgttgaaagcgggcttagcctttacatgattctggttacgtctggcattagcggagcgatgggctccgtggcgctaacgtacttctgggaacgcctgacggggatgaagaatgcaaaccagtgataaaggcattgccctgataaaagcgtttnnnnnnnnnnnnnnnnnnnnnnnnnnnnnnnnnnnnnnnnnnnnnnnnnnnnnnnnnnnnnnnnnnnnnnnnnnnnnnnnnnnnnnnnnnnnnnnnnnnnnnnnnnnnnnnnnnnnnnnnnnnnnnnnnnnnnnnnnnnnnnnnnnnnnnnnnnnnnnnnnnnnnnnnnnnnnnnnnnnnnnnnnnnnnnnnnnnnnnnnnnnnnnnnnnnnnnnnnnnnnnnnnnnnnnnnnnnnnnnnnnnnnnnnnnnnnnnnnnnnnnnnnnnnnnnnnnnnnnnnnnnnnnnnnnnnnnnnnnnnnnnnnnnnnnnnnnnnnnnnnnnnnnnnnnnnnnnnnnnnnnnnnnnnnnnnnnnnnnnnnnnnnnnnnnnnnnnnnnnnnnnnnnnnnnnnnnnnnnnnnnnnnnnnnnnnnnnnnnnnnnnnnnnnnnnnnnnnnnnnnnnnnnnnnnnnnnnnnnnnnnnnnnnnnnnnnnnnnnnnnnnnnnnnnnnnnnnnnnnnnnnnnnnnnnnnnnnnnnnnnnnnnnnnnnnnnnnnnnnnnnnnnnnnnnnnnnnnnnnnnnnnnnnnnnnnnnnnnnnnnnnnnnnnnnnnnnnnnnnnnnnnnnnnnnnnnnnnnnnnnnnnnnnnnnnnnnnnnnnnnnnnnnnnnnnnnnnnnnnnnnnnnnnnnnnnnnnnnnnnnnnnnnnnnnnnnnnnnnnnnnnnnnnnnnnnnnnnnnnnnnnnnnnnnnnnnnnnnnnnnnnnnnnnnnnnnnnnnnnnnnnnnnnnnnnnnnnnnnnnnnnnnnnnnnnnnnnnnnnnnnnnnnnnnnnnnnnnnnnnnnnnnnnnnnnnnnnnnnnnnnnnnnnnnnnnnnnnnnnnnnnnnnnnnnnnnnnnnnnnnnnnnnnnnnnnnnnnnnnnnnnnnnnnnnnnnnnnnnnnnnnnnnnnnnnnnnnnnnnnnnnnnnnnnnnnnnnnnnnnnnnnnnnnnnnnnnnnnnnnnnnnnnnnnnnnnnnnnnnnnnnnnnnnnnnnnnnnnnnnnnnnnnnnnnnnnnnnnnnnnnnnnnnnnnnnnnnnnnnnnnnnnnnnnnnnnnnnnnnnnnnnnnnnnnnnnnnnnnnnnnnnnnnnnnnnnnnnnnnnnnnnnnnnnnnnnnnnnnnnnnnnnnnnnnnnnnnnnnnnnnnnnnnnnnnnnnnnnnnnnnnnnnnnnnnnnnnnnnnnnnnnnnnnnnnnnnnnnnnnnnnnnnnnnnnnnnnnnnnnnnnnnnnnnnnnnnnnnnnnnnnnnnnnnnnnnnnnnnnnnnnnnnnnnnnnnnnnnnnnnnnnnnnnnnnnnnnnnnnnnnnnnnnnnnnnnnnnnnnnnnnnnnnnnnnnnnnnnnnnnnnnnnnnnnnnnnnnnnnnnnnnnnnnnnnnnnnnnnnnnnnnnnnnnnnnnnnnnnnnnnnnnnnnnnnnnnnnnnnnnnnnnnnnnnnnnnnnnnnnnnnnnnnnnnnnnnnnnnnnnnnnnnnnnnnnnnnnnnnnnnnnnnnnnnnnnnnnnnnnnnnnnnnnnnnnnnnnnnnnnnnnnnnnnnnnnnnnnnnnnnnngatgtcgattctggcgttaaacggctgcgcatcgccgcaacctcgccctggagtgtcaaaagccacctccgccaccggcgtggatgatgcaggaacccccgaacttactccagacgctcgacggaattatttcgatcaccgggacggaatcgcaaccgctgacaaaatgattcgcggcatgcaggactatatcaaagagcagtgcctcaaataaccgggcactgaaaaccaccaaacaggagtaatacatggctaagttttacccgcgcatctccactttcctttctgggtgctgggcgtttatcgcgtccttttcgctaaccagcgacatcatcagtcgcacggcattctcgttgcgccgggtggtagagcgtgttgtttccgcagtcgctgtgaaagcctcacctgaaaatgctgattggcgaatcgtagagcgaatgtgcagcgaaaccgttcgagagaagattaacgtttttggccgtcaccctcgcaataccggcgcgctatgcagtccactgctgtaggcattacagaagctcttcactgaggggcttcgataatgatctgtgtaaccccgcaaggatggtgatcacatcttgctgacgggtaagccgtaagtggctaagcacttctgagaagcagggcaacagctgcgacaaggcaaagaggtaatcatgtccgacatctaccaaatcacgctaaccacccaaacgggcgaaaccttcacgggcaagatgtcacgacgtcagcctgaactggtaaacggctttgtgccgctggcgacggagacaggagagtggctgtatttcgctccggccgatgtgaagcgtgtgcagtttacgccggtaccggcagagcaaaccgaacatccagcagaagaaacaacggagtaacgaatgagcaaaccggacttggaggccattgaggcggcgatttgatcaacagttatcaaaatacgaaatcctgaagcgccgcactgtatttgccgaggtaaagaaggcttaatcaggtttcaggcattgaagattttataaactcgaataatgcgagagcttcatcagataattcacggcgagtgacccagtcatgctcattcaattgccatgcaaggcctaaagcctgattcaatcctggatatgcaattgtagaatcatcagtgttactgcttgctgcttccatttttgctaatggaattcttaaacgattgatctttcgcttataggtctgtatttcgccacgcacatgattcaatggagagctgtcacttctcgcaaactgatctaatgttcttactaattcatatacgcccaaaacccagagatatgaagaagtgatgtgatcactcaagtcatgcattgggtttttggggtatccagttctaatgagttcagcatcatcattaataaggcgagaatccagcgtgcctagatgttgaagggttaccacagaccattgattgtggacagcaatagcatgggaacagtcaacccatcttttgttcctgtctacatcaaataatccagcaacgtaagccctaagtttcccattgtggggtttctttaattcctctgacaaattgtccattcgatctccttaggaacaatatggcactcactgacaagcaagaaatgttttgtcgcgagtacctcatcgatttaaacgccacgcaagcggctattcgggcggggtacagcgcaaagacagctaaccgcaccgcgtccgaaaacctgtcaaaacctgacatccagtccagaattgccgaacttaaagcgcaacgcaatgatctggttggcataaatgcgacatacgtcctgaatcgtctcgttgagattgaccagatggacgtgttggacatcctcaaagatgacatgagtctgaggccagtaagcgagtggccttcatcctggcggagatatttgagcggcttcgatgtggctgagatgtttgaaggccgtggtgaggagcgtgagatggtcgggcttctcaagaaaattaagtggccggataaagtcaaaaacctcgaactgcttgggaagcacatagatgtgatggctttcaaagagcaggccacccatgagcatacaggcaagaatggtgggccaatcgaaatggctacactgaccaaagaagagtataaggctgcccggcgggagatgttggaggatgacgactgctgagcaaaaggcttacgcccgcaagattgagtgcgaagaggacgggctttactacgctcgatacttcttcaagcaacgtactggcggcaagatgattgtcgcgccgcaccacaaggtgattcagcagacgctggaccgcgtcattgatggtgagattcagcgcctgatcatcaacgtcccgcctgggtacacgaaaacggagctggctaccatcaacatgatgggccgcggactggcactgaactgccgggctcgctttatgcacttgtcctactcgcataacctggcgctgctgaactcctctacagctcgcggcatgattaagtcgcaggcgtatcagtcaatgtggcctatgtcgttgcgtgatgatgccgacagcaaggctatgtggtggacagaacacggtggcggcgtttatgcgtcgtccgcagccgggcaggttacaggcttccgtgccggacatatggaaccaggctggcagggcgcgctgattatcgatgacccggttaagccagatgatgcttactcagagatcgtccgcgacggcgtgaacaaccgtttcaacgagacaatcaaatcacgactggcgatcgagacgacgccgatgattgtcatcatgcagcgcattcactaccacgacctgagtggttacctgctgcggggcggtagtggtgagaaatggcatcaccttaatctgccggtaattatcgacaacagtcagccatacgctgcgcagtaccctgaaaacacccacgctataccgattgaccatggcctgcctgatggctggttgtggccatttaagcataacgaatcgcaccgcgtatccctgttctctcaccggcgcaccgccgaagctcagtacatgcagaaccctaaacgcttcaatgcagagggggcgctgtggaatgaggagatgatcagcgccgcgcacgagatgcggatcacccaggagctcgcccgtacggtcgtagcaatcgacccgcaggcgacaaacagcgaagagagcgatgaatccggtatcgctgttgcgagtgtttacggtagcggtgatgagcggcaatacagccttgatgctgattacagcggcaaatactcccctaatggttgggctacgaaagctatcgatgcctatgtacagcatgaagctgatgcgatcgtcattgaaactaaccagggcggcgatatggcagaggacactctccgcaacgccggatttaccggtcgcgttatccgtgtgcatgccagtaaaggcaagtatgcccgagcagagccgatatctgctctgtacgcccaggggcgcgtagctcatcgcggcagtctgtacgaggtcgaaaaccagttcatggaatacgtgccatccactgcgaaaaaatcacctgaccgcctcgacgctgcggtttatgcactaaccgaactatcagaaccacaatcactcggcatgttggtgcgctcgcgctgacggaggaaaccnnnnnnnnnnnnnnnnnnnnnnnnnnnnnnnnnnnnnnnnnnnnnnnnnnnnnnnnnnnnnnnnnnnnnnnnnnnnnnnnnnnnnnnnnnnnnnnnnnnnnnnnnnnnnnnnnnnnnnnnnnnnnnnnnnnnnnnnnnnnnnnnnnnnnnnnnnnnnnnnnnnnnnnnnnnnnnnnnnnnnnnnnnnnnnnnnnnnnnnnnnnnnnnnnnnnnnnnnnnnnnnnnnnnnnnnnnnnnnnnnnnnnnnnnnnnnnnnnnnnnnnnnnnnnnnnnnnnnnnnnnnnnnnnnnnnnnnnnnnnnnnnnnnnnnnnnnnnnnnnnnnnnnnnnnnnnnnnnnnnnnnnnnnnnnnnnnnnnnnnnnnnnnnnnnnnnnnnnnnnnnnnnnnnnnnnnnnnnnnnnnnnnnnnnnnnnnnnnnnnnnnnnnnnnnnnnnnnnnnnnnnnnnnnnnnnnnnnnnnnnnnnnnnnnnnnnnnnnnnnnnnnnnnnnnnnnnnnnnnnnnnnnnnnnnnnnnnnnnnnnnnnnnnnnnnnnnnnnnnnnnnnnnnnnnnnnnnnnnnnnnnnnnnnnnnnnnnnnnnnnnnnnnnnnnnnnnnnnnnnnnnnnnnnnnnnnnnnnnnnnnnnnnnnnnnnnnnnnnnnnnnnnnnnnnnnnnnnnnnnnnnnnnnnnnnnnnnnnnnnnnnnnnnnnnnnnnnnnnnnnnnnnnnnnnnnnnnnnnnnnnnnnnnnnnnnnnnnnnnnnnnnnnnnnnnnnnnnnnnnnnnnnnnnnnnnnnnnnnnnnnnnnnnnnnnnnnnnnnnnnnnnnnnnnnnnnnnnnnnnnnnnnnnnnnnnnnnnnnnnnnnnnnnnnnnnnnnnnnnnnnnnnnnnnnnnnnnnnnnnnnnnnnnnnnnnnnnnnnnnnnnnnnnnnnnnnnnnnnnnnnnnnnnnnnnnnnnnnnnnnnaaagcgaaatgaacaaacaatttgccgcaaatgccagcctcgatcgtgaccgtatgcgctacgttaacgctctgtttaatggcaccagtaatacgaaacgccagcgactttaccaagagtttggctatccactgaacctgaagttcgacgactttttccgggcctacagccgtaatgcaattgccaatgctgcggttaaccggatggttgatggctgctgggaggacttcccggatgtctacgaaggtgaccagacgaaggatgccaccaagcaaacggaatgggataagcgcgtaaacaaactgctcaagcgttgctggaaacagattaaaggcgctgacaagcgaaacctcgtggggcgctactctgcgctgctgatccaggtaaaggataaccggacctgggataagccggtcgataagatcgttactgccaggcagaaggaaaaggcgttagttaagttgatcccggtgtgggaggcacagattgagcctgtcacttacaacgaagatcagagcagcgagaagtatggtgacgtcaccatgtactcgtttactgaaattccggtacaacagcaagctggtgggcagcccgggcgcatcatcaacgtccatcctgaccgcgtaattatccttgctgaaggttcagatgacggccgcctctactcaggcgaatcaatgcttgctgccggtttccataaaatcatggacagcgagaaggtctccggcggtgccgccgaggggttcttcaaaaacgccagccgccagctcaacttcaacttcagcgccaaaacaaacttctcagcgctggctaaggctcttggtgtttccgaatctcnnnnnnnnnnnnnnnnnnnnnnnnnnnnnnnnnnnnnnnnnnnnnnnnnnnnnnnnnnnnnnnnnnnnnnnnnnnnnnnnnnnnnnnnnnnnnnnnnnnnnnnnnnnnnnnnnnnnnnnnnnnnnnnnnnnnnnnnnnnnnnnnnnnnnnnnnnnnnnnnnnnnnnnnnnnnnnnnnnnnnnnnnnnnnnnnnnnnnnnnnnnnnnnnnnnnnnnnnnnnnnnnnnnnnnnnnnnnnnnnnnnnnnnnnnnnnnnnnnnnnnnnnnnnnnnnnnnnnnnnnnnnnnnnnnnnnnnnnnnnnnnnnnnnnnnnnnnnnnnnnnnnnnnnnnnnnnnnnnnnnnnnnnnnnnnnnnnnnnnnnnnnnnnnnnnnnnnnnnnnnnnnnnnnnnnnnnnnnnnnnnnnnnnnnnnnnnnnnnnnnnnnnnnnnnnnnnnnnnnnnnnnnnnnnnnnnnnnnnnnnnnnnnnnnnnnnnnnnnnnnnnnnnnnnnnnnnnnnnnnnnnnnnnnnnnnnnnnnnnnnnnnnnnnnnnnnnnnnnnnnnnnnnnnnnnnnnnnnnnnnnnnnnnnnnnnnnnnnnnnnnnnnnnnnnnnnnnnnnnnnnnnnnnnnnnnnnnnnnnnnnnnnnnnnnnnnnnnnnnnnnnnnnnnnnnnnnnnnnnnnnnnnnnnnnnnnnnnnnnnnnnnnnnnnnnnnnnnnnnnnnnnnnnnnnnnnnnnnnnnnnnnnnnnnnnnnnnnnnnnnnnnnnnnnnnnnnnnnnnnnnnnnnnnnnnnnnnnnnnnnnnnnnnnnnnnnnnnnnnnnnnnnnnnnnnnnnnnnnnnnnnnnnnnnnnnnnnnnnnnnnnnnnnnnnnnnnnnnnnnnnnnnnnnnnnnnnnnnnnnnnnnnnnnnnnnnnnnnnnnnnnnnnnnnnnnnnnnnnnnnnnnnnnnnnnnnnnnnnnnnnnnnnnnnnnnnnnnnnnnnnnnnnnnnnnnnnnnnnnnnnnnnnnnnnnnnnnnnnnnnnnnnnnnnnnnnnnnnnnnnnnnnnnnnnnnnnnnnnnnnnnnnnnnnnnnnnnnnnnnnnnnnnnnnnnnnnnnnnnnnnnnnnnnnnnnnnnnnnnnnnnnnnnnnnnnnnnnnnnnnnnnnnnnnnnnnnnnnnnnnnnnnnnnnnnnnnnnnnnnnnnnnnnnnnnnnnnnnnnnnnnnnnnnnnnnnnnnnnnnnnnnnnnnnnnnnnnnnnnnnnnnnnnnnnnnnnnnnnnnnnnnnnnnnnnnnnnnnnnnnnnnnnnnnnnnnnnnnnnnnnnnnnnnnnnnnnnnnnnnnnnnnnnnnnnnnnnnnnnnnnnnnnnnnnnnnnnnnnnnnnnnnnnnnnnnnnnnnnnnnnnnnnnnnnnnnnnnnnnnnnnnnnnnnnnnnnnnnnnnnnnnnnnnnnnnnnnnnnnnnnnnnnnnnnnnnnnnnnnnnnnnnnnnnnnnnnnnnnnnnnnnnnnnnnnnnnnnnnnnnnnnnnnnnnnnnnnnnnnnnnnnnnnnnnnnnnnnnnnnnnnnnnnnnnnnnnnnnnnnnnnnnnnnnnnnnnnnnnnnnnnnnnnnnnnnnnnnnnnnnnnnnnnnnnnnnnnnnnnnnnnnnnnnnnnnnnnnnnnnnnnnnnnnnnnnnnnnnnnnnnnnnnnnntaatcgcctggacgagatgatcgccggtaccaataccgacccgattcacctctctaccggactgctcacgaacaaagagaaaaagtccggtgagtccaagggcaaaaagcattcgtggatcgcccgcaatatgcagttcgaccacatagccatcctgctggatgagcctggtgctggcacaccggaagatggcgtcggtatgttcgtgaatgctgacgggcaggaaggaaaagtcgagaccgccagcctcactgacgccgctaacagcctgaaagacggctggatgaacaaggcgaagtttttcctcgcccataactctgacgcctcattcgatgaaatctaccagatgctgcgcgaggcaattcgcgcgccgtccggcagtgacgtttatcgctatgtggtgaccgtctggccggacaaattcatctacgaagagggctcgaaactcttccagcagaaatacctcatcgatgacaacgcggtaacgctggtcggtgagccagtagaagtcgtgcgcaaacccactgagtacgaagtcaaaaccaacggagaaacaaacccgatgaaagagaagatgatcgccgcgctcaatgccgcaggcgttaaaaccgaggggctgaccgacgatcaggtctgggatgcctacaaccagcagatgcagaaaaaagaaggcggcggcgatcctggccaggctcagattaattctgatgtgattacagcggctgttaatgcggcgctcaccccgttgaacgaaaagctgagcaagctggaaactcagttgcaagctaatgctgaaagcgaactgaagaccaagcgcgatgcggttaaagcgaaattctcgttcatgaccgaagcagcggttaactccctgtccggtgacgtgctgaacgacctgtactcacagtgccagaccagcaccggtctgaaccctgcattccaggggaatggcgctcagagtgaaatccttaacatggaggcacctgaataatggctctcgcacctcgtttccataccgtaatcgcgggcccggcccgtaagaatgaccctcaggtaattgaggcgatctgcaaagtcgccattctccctggctctcttgttgaacttgatgcaagtgggcaattcatttatcacgccactgctggcggccctggcgtggcgcttgccatgcagcacaactatatcggcggcggcgatatccgagacgcggttcccgctggtgatactggcgcggcgatcatgtgtgaagacgatgttgactaccacatgcgcgtcaaagccggggaagtgctgctggaaaatgaaggcctggtttctgccggtgacggcacgctggccaagtcaaccacaccagccaccgaccaggtcctattttattcacgcgaaaaaatcaccgttggcgctgaagctcaactcgtgaaagttcgcaaatcagggaaagcaaccgcatgagcatgatcgtattcaacaaaaagctgatcaccgagcacaaccaggtgaagcaggcatggaatcaactgcttatgcagcgtgaatccttcaatnnnnnnnnnnnnnnnnnnnnnnnnnnnnnnnnnnnnnnnnnnnnnnnnnnnnnnnnnnnnnnnnnnnnnnnnnnnnnnnnnnnnnnnnnnnnnnnnnnnnnnnnnnnnnnnnnnnnnnnnnnnnnnnnnnnnnnnnnnnnnnnnnnnnnnnnnnnnnnnnnnnnnnnnnnnnnnnnnnnnnnnnnnnnnnnnnnnnnnnnnnnnnnnnnnnnnnnnnnnnnnnnnnnnnnnnnnnnnnnnnnnnnnnnnnnnnnnnnnnnnnnnnnnnnnnnnnnnnnnnnnnnnnnnnnnnnnnnnnnnnnnnnnnnnnnnnnnnnnnnnnnnnnnnnnnnnnnnnnnnnnnnnnnnnnnnnnnnnnnnnnnnnnnnnnnnnnnnnnnnnnnnnnnnnnnnnnnnnnnnnnnnnnnnnnnnnnnnnnnnnnnnnnnnnnnnnnnnnnnnnnnnnnnnnnnnnnnnnnnnnnnnnnnnnnnnnnnnnnnnnnnnnnnnnnnnnnnnnnnnnnnnnnnnnnnnnnnnnnnnnnnnnnnnnnnnnnnnnnnnnnnnnnnnnnnnnnnnnnnnnnnnnnnnnnnnnnnnnnnnnnnnnnnnnnnnnnnnnnnnnnnnnnnnnnnnnnnnnnnnnnnnnnnnnnnnnnnnnnnnnnnnnnnnnnnnnnnnnnnnnnnnnnnnnnnnnnnnnnnnnnnnnnnnnnnnnnnnnnnnnnnnnnnnnnnnnnnnnnnnnnnnnnnnnnnnnnnnnnnnnnnnnnnnnnnnnnnnnnnnnnnnnnnnnnnnnnnnnnnnnnnnnnnnnnnnnnnnnnnnnnnnnnnnnnnnnnnnnnnnnnnnnnnnnnnnnnnnnnnnnnnnnnnnnnnnnnnnnnnnnnnnnnnnnnnnnnnnnnnnnnnnnnnnnnnnnnnnnnnnnnnnnnnnnnnnnnnnnnnnnnnnnnnnnnnnnnnnnnnnnnnnnnnnnnnnnnnnnnnnnnnnnnnnnnnnnnnnnnnnnnnnnnnnnnnnnnnnnnnnnnnnnnnnnnnnnnnnnnnnnnnnnnnnnnnnnnnnnnnnnnnnnnnnnnnnnnnnnnnnnnnnnnnnnnnnnnnnnnnnnnnnnnnnnnnnnnnnnnnnnnnnnnnnnnnnnnnnnnnnnnnnnnnnnnnnnnnnnnnnnnnnnnnnnnnnnnnnnnnnnnnnnnnnnnnnnnnnnnnnnnnnnnnnnnnnnnnnnnnnnnnnnnnnnnnnnnnnnnnnnnnnnnnnnnnnnnnnnnnnnnnnnnnnnnnnnnnnnnnnnnnnnnnnnnnnnnnnnnnnnnnnnnnnnnnnnnnnnnnnnnnnnnnnnnnnnnnnnnnnnnnnnnnnnnnnnnnnnnnnnnnnnnnnnnnnnnnnnnnnnnnnnnnnnnnnnnnnnnnnnnnnnnnnnnnnnnnnnnnnnnnnnnnnnnnnnnnnnnnnnnnnnnnnnnnnnnnnnnnnnnnnnnnnnnnnnnnnnnnnnnnnnnnnnnnnnnnnnnnnnnnnnnnnnnnnnnnnnnnnnnnnnnnnnnnnnnnnnnnnnnnnnnnnnnnnnnnnnnnnnnnnnnnnnnntagcgctgagccggacccggtcgtggcaggtgccgatgaggtccgtcacgtgacgcgctggaacgacactctcgacggtctggaagatgactgggcgataattacgggagtgtagccatgggcatcaaagtgaagggcatcagccaggcgaagaagcacctgaacgatgtcatcaacgacgttaaggggcgcaaggtaatccgcgccctccagtcagcgatgattctcatcggtgcccgggcagcctattacactccgatcgacacctccacgcttattaacagccagttccgcgaaattgacgctggtggcgtgctcattacagggcgcgtcggttactcagccaactatgccgcatacgtgcatgaggcgtcaggcaaactcaaaggtcagcctcgcgcgcacttcggtgtgaccagttccgggcagcagttcggcggcgggaccggaaagggcaactactgggaccctcacggtgagtcgcaattcctgaccaaaggcgcaaatgacgagcgcgataacgttgatgcggtgatgcgcaaggagctttcgctatgacacccatgatgcacgagcgggtgcgcaacatgttcggcgacgccgggctaactgccggcttcacggtgcagcagttgatgtacgacgacccgggcgacctgtcgaaggcgatcatggtgttcaggccaaacggcgggtcgaacatccgcactgacctcggttctgagtatcacgtcctggtcgacgttgtcggcgcaaaggacaagcgcaaagacgcgctcaacgccgtgcagcgcatcgtcgattacgtccaggccaaccccatggctgacgagtgcgtcggctacatccagaacatgggcgcaatcccagcgccggtgcccacagaagaagggcgaatagtcttccgactccagttcgcctgcacttacggcgaatagccattcccaaccaaataacccgcctcggcgggttttcttttatacgtcaaagaggagtttcacatgggtaactgcccgaactcgaacgagcgccttttcggcggtgcggtcgtgctggaagtcgccgatggctgcccggacgtcaagccactcgaaggggagtggatggcgctggccgctggtacgtcgaaaggcttcgacttcaacccgaactcggttacctctgatgcggatgacggcggcggctatgtcgagaccatcatcaccaacagtgatttcaccctgagctttgaaggtgaagtgcgcaagaaggacaagttggatcagtacggtgtcggcaaattcatcaagtatttcgctgatgaactaaaggccaagcgccannnnnnnnnnnnnnnnnnnnnnnnnnnnnnnnnnnnnnnnnnnnnnnnnnnnnnnnnnnnnnnnnnnnnnnnnnnnnnnnnnnnnnnnnnnnnnnnnnnnnnnnnnnnnnnnnnnnnnnnnnnnnnnnnnnnnnnnnnnnnnnnnnnnnnnnnnnnnnnnnnnnnnnnnnnnnnnnnnnnnnnnnnnnnnnnnnnnnnnnnnnnnnnnnnnnnnnnnnnnnnnnnnnnnnnnnnnnnnnnnnnnnnnnnnnnnnnnnnnnnnnnnnnnnnnnnnnnnnnnnnnnnnnnnnnnnnnnnnnnnnnnnnnnnnnnnnnnnnnnnnnnnnnnnnnnnnnnnnnnnnnnnnnnnnnnnnnnnnnnnnnnnnnnnnnnnnnnnnnnnnnnnnnnnnnnnnnnnnnnnnnnnnnnnnnnnnnnnnnnnnnnnnnnnnnnnnnnnnnnnnnnnnnnnnnnnnnnnnnnnnnnnnnnnnnnnnnnnnnnnnnnnnnnnnnnnnnnnnnnnnnnnnnnnnnnnnnnnnnnnnnnnnnnnnnnnnnnnnnnnnnnnnnnnnnnnnnnnnnnnnnnnnnnnnnnnnnnnnnnnnnnnnnnnnnnnnnnnnnnnnnnnnnnnnnnnnnnnnnnnnnnnnnnnnnnnnnnnnnnnnnnnnnnnnnnnnnnnnnnnnnnnnnnnnnnnnnnnnnnnnnnnnnnnnnnnnnnnnnnnnnnnnnnnnnnnnnnnnnnnnnnnnnnnnnnnnnnnnnnnnnnnnnnnnnnnnnnnnnnnnnnnnnnnnnnnnnnnnnnnnnnnnnnnnnnnnnnnnnnnnnnnnnnnnnnnnnnnnnnnnnnnnnnnnnnnnnnnnnnnnnnnnnnnnnnnnnnnnnnnnnnnnnnnnnnnnnnnnnnnnnnnnnnnnnnnnnnnnnnnnnnnnnnnnnnnnnnnnnnnnnnnnnnnnnnnnnnnnnnnnnnnnnnnnnnnnnnnnnnnnnnnnnnnnnnnnnnnnnnnnnnnnnnnnnnnnnnnnnnnnnnnnnnnnnnnnnnnnnnnnnnnnnnnnnnnnnnnnnnnnnnnnnnnnnnnnnnnnnnnnnnnnnnnnnnnnnnnnnnnnnnnnnnnnnnnnnnnnnnnnnnnnnnnnnnnnnnnnnnnnnnnnnnnnnnnnnnnnnnnnnnnnnnnnnnnnnnnnnnnnnnnnnnnnnnnnnnnnnnnnnnnnnnnnnnnnnnnnnnnnnnnnnnnnnnnnnnnnnnnnnnnnnnnnnnnnnnnnnnnnnnnnnnnnnnnnnnnnnnnnnnnnnnnnnnnnnnnnnnnnnnnnnnnnnnnnnnnnnnnnnnnnnnnnnnnnnnnnnnnnnnnnnnnnnnnnnnnnnnnnnnnnnnnnnnnnnnnnnnnnnnnnnnnnnnnnnnnnnnnnnnnnnnnnnnnnnnnnnnnnnnnnnnnnnnnnnnnnnnnnnnnnnnnnnnnnnnnnnnnnnnnnnnnnnnnnnnnnnnnnnnnnnnnnnnnnnnnnnnnnnnnnnnnnnnnnnnnnnnnnnnnnnnnnnnnnnnnnnnnnnnnnnnnnnnnnnnnnnnnnnnnnnnnnnnnnnnnnnnnnnnnnnnnnnnnnnnnnnnnnnnnnnnnnnnnnnnnnnnnnnnnnnnnnnnnnnnnnnnnnnnnnnnnnnnnnnnnnnnnnnnnnnnnnnnnnnnnnnnnnnnnnnnnnnnnnnnnnnnnnnnnnnnnnnnnnnnnnnnnnnnnnnnnnnnnnnnnnnnnnnnnnnnnacaagagaggagtacgacgctgtggcggatgcttatcttgcccgaagagctagtagggcaagacaattagcgttaagtagtgaggtttgaaatctagagtctctttggtggcaaactttccgcaacattttcattaataagcgaatcgtttaattcttcctgttcttgaactgaagttaaaataccatctattctaacaattaaatctctaattaatggatagtgtttatcttttttgtctgccttcttgaattctactctggacttggaaaaatcctccattatttgatcaaaatcactgctcgagaagccagcctcatttttcttggctgaggttattctgtgttcaatattctgtaattcattaactaaatctttaatcatttcatgcctcccattgcatatttttaaattgaacttgaaaacgctgaatatcacttaaaatactttataaaacattccataaacaggaaagataattatctggagaatgacatggcaggtgagaagaacgccggtagcatcgtttatgaaatcagcgccgacgttgagccgctgctgcagggcgggaaacaggccattgatgctctggataaactggatgctgcagcccagcagtccggcaagggaatggataacctcgaccagagcgcatcccaaaccgggtccgcgtttactgaactggctggttatgccaactccatggataaccagctgcgcaagctgaataccaacgtcagcggcattgcccgcgctatggaagaggcccgcagcggtaccggcggtgctagcagtgaattcagccgtgcagaatccatcatcgaggcgctgggtaaccagctggctgtgctggacgaagctcaggagaatggcgcacgcagtgctgctgttttagcggcacagcttcgggccgggtcaaaagcgagcgatgaggaaaaacagaagattggcgatctgactggtcgcctatatgacatgaagactggcgctgaaggtggcgccaaaggtaccggcgaatggaagtccagcatgcagcaggctgggtaccaagtacaggacttcatcgtacaggttcagggtgggcagtccgcgctggtggcgtttgctcagcaaggctcacaactcgctggtgcattcggcccgggcggcgcagtggtgggggcattcattgcgctcagttcagtgattgctggcgtgctgatcacctcgcttaatggcggtaagaccgcaatggacgcgctgaaagacgcagccgaagccatggacaaggtaatcaacgtctcgattaacggcgtggccgcgctgtcagacaaatatgcgtacctggcgaagaccaacgctgaggtcgcaacgctgatgcgtaaccaggcgctcctggagtacaacgaggcgatcaacaaaataccgaaagccatcagtgacgcatcaagttctctactgtctttcggtgataaagcattgtcggcgttctctggcggctatgcatcggtagatggatttaatgaccgtctggctactctggaaattaccaccgataactatgccgaggcagttaagcaggcatacggcgcaggtcaggcgttccaggctactgcgaacagcatcggcaatactgttggagccgtagcggacaagttcggcatcaccgagcagaaagcatttgagctgagcaagcagctttcagatattgccaaaaacccatcgccagaggctttacagcgtttggctacagagttgcagaacacgcagagttctactgaaaaggggcaaactgcgctcacagcgttcgttggtaagttggtagaactttcgcgtgaggcggtaatcgccaaaggcaacgtcgcggcgctcaagcaagagacagacaatctaaccagcggccagaagaacctgatcaagcagtcagaacgtaatctggcactgtctaagctccagggggaggcccgcgcgcggttgcaggcacaatacgctgccgaagatgccggatttgcgaaggatgatccgcatgccaagcagatggaggatgacgctgccgccacttacaaaannnnnnnnnnnnnnnnnnnnnnnnnnnnnnnnnnnnnnnnnnnnnnnnnnnnnnnnnnnnnnnnnnnnnnnnnnnnnnnnnnnnnnnnnnnnnnnnnnnnnnnnnnnnnnnnnnnnnnnnnnnnnnnnnnnnnnnnnnnnnnnnnnnnnnnnnnnnnnnnnnnnnnnnnnnnnnnnnnnnnnnnnnnnnnnnnnnnnnnnnnnnnnnnnnnnnnnnnnnnnnnnnnnnnnnnnnnnnnnnnnnnnnnnnnnnnnnnnnnnnnnnnnnnnnnnnnnnnnnnnnnnnnnnnnnnnnnnnnnnnnnnnnnnnnnnnnnnnnnnnnnnnnnnnnnnnnnnnnnnnnnnnnnnnnnnnnnnnnnnnnnnnnnnnnnnnnnnnnnnnnnnnnnnnnnnnnnnnnnnnnnnnnnnnnnnnnnnnnnnnnnnnnnnnnnnnnnnnnnnnnnnnnnnnnnnnnnnnnnnnnnnnnnnnnnnnnnnnnnnnnnnnnnnnnnnnnnnnnnnnnnnnnnnnnnnnnnnnnnnnnnnnnnnnnnnnnnnnnnnnnnnnnnnnnnnnnnnnnnnnnnnnnnnnnnnnnnnnnnnnnnnnnnnnnnnnnnnnnnnnnnnnnnnnnnnnnnnnnnnnnnnnnnnnnnnnnnnnnnnnnnnnnnnnnnnnnnnnnnnnnnnnnnnnnnnnnnnnnnnnnnnnnnnnnnnnnnnnnnnnnnnnnnnnnnnnnnnnnnnnnnnnnnnnnnnnnnnnnnnnnnnnnnnnnnnnnnnnnnnnnnnnnnnnnnnnnnnnnnnnnnnnnnnnnnnnnnnnnnnnnnnnnnnnnnnnnnnnnnnnnnnnnnnnnnnnnnnnnnnnnnnnnnnnnnnnnnnnnnnnnnnnnnnnnnnnnnnnnnnnnnnnnnnnnnnnnnnnnnnnnnnnnnnnnnnnnnnnnnnnnnnnnnnnnnnnnnnnnnnnnnnnnnnnnnnnnnnnnnnnnnnnnnnnnnnnnnnnnnnnnnnnnnnnnnnnnnnnnnnnnnnnnnnnnnnnnnnnnnnnnnnnnnnnnnnnnnnnnnnnnnnnnnnnnnnnnnnnnnnnnnnnnnnnnnnnnnnnnnnnnnnnnnnnnnnnnnnnnnnnnnnnnnnnnnnnnnnnnnnnnnnnnnnnnnnnnnnnnnnnnnnnnnnnnnnnnnnnnnnnnnnnnnnnnnnnnnnnnnnnnnnnnnnnnnnnnnnnnnnnnnnnnnnnnnnnnnnnnnnnnnnnnnnnnnnnnnnnnnnnnnnnnnnnnnnnnnnnnnnnnnnnnnnnnnnnnnnnnnnnnnnnnnnnnnnnnnnnnnnnnnnnnnnnnnnnnnnnnnnnnnnnnnnnnnnnnnnnnnnnnnnnnnnnnnnnnnnnnnnnnnnnnnnnnnnnnnnnnnnnnnnnnnnnnnnnnnnnnnnnnnnnnnnnnnnnnnnnnnnnnnnnnnnnnnngttgactcactggctgggaatgcttctaacgcctttactggacttatcaccaaaaagtatggacgccgaagaggcggctaaatcattaggcaggactgtattaaatagccttgttaatacgtttgtgcagatggggtctgagtgggttaagtcggccataatgggttccacaacccagcaggctgcaattgcagcgacaacgtcagctcaggttgctggcattggcgtgcaatccgctgccagtaccacagcagccgctgcgtcaactgctgcatggactcctgcggccatcatgtcctccattgcgtcattcggtggtgcggtggcgatcggcatcggtgctatggctggcatcctcgctctgtctggcaagcgtaagaacggcgggccaattcaagctggtggcatgtatcaggtaggtgagggcgataagccagaaatcttccgcgctaacaatggcagccaatacatggtgtctggcgataatggaaccatgctcagcaacaaggacattacttcaggtggtggaggtggggctccgattatcaacatctacaactactcatccgcgtctgttgatgctcaggctacgcagaacggcgatggttcatggacgcttgaagcattcatcgctgacatgaataacggcggccctgcaagcaacgccataaccagcaacatgaacgttaaacgcacgccaagagggcagggctgatgccaatcatcgattacccagactggctgccgctggcgcagaaggccagcaaaaacatgacgctcgataccgggttccagaccgttcagccagcggtcggcccggctatctttgagaaccagaccgacgacctgaaagtgacctggtcactgacgtggatcttcactctggctgaggaacgagcattccagcagtggctgcgcagcccgaactatctcaaccggggcctgaactggttcaggatgaatatcaatctgggcggcagtggtctccagttgcaggagcttcacttcacgcagatgccggtgcaaaccagtatcgacggcggagtggtgacctggacggggacggtaatcgctaaccacctctacaatgccgacgacgaattcgacgacgtgattgttgagttgccgccgccatggccttcagtgcttgatatcgtggtgactggctatccggacggacgcgatccagaaagtcttccgagggttccctgatgccttcatatcgtgaatataatcagaagcgcccgattagcggctgttacaacaccatcacgttctatcacccctcctttggttacgtccgcctcgtcgacaaacagttcttcccgaagacgcttggcggccagacgtacacgcctgcgcggtttgaaatcgaagagagccagcagagcggaactccggtaatcgacgcaacggtgaagcttgggcgactgtcttcagatatcaaaacgctgatgaagaagtggagtggtgtttccaggctgtcgcctatcacggcaactcgtcaggttttcgatagagttgatacctctacgccaatgaagaattggacattatttgtaaaaactgtcgatgttgtttcagataacgcatcagttactttatcaatgacaaacccgctaaataacaacattggccaaccatatgatccagtcgaatacacggggcttcagtacctctgattttatcagcaggatgatcggcgtgccgtggtctaaccgcgcctgctcattcgaaaagactgattgctgggggctggtggtcctgtattaccgtcacgtcctcggcattgagctgcaccagacgccggactacgaagccggggctgacttcttcacctgctatcagggcgacgtcgtcttctggcgccaggtcgataaaccgatcgaaggcgggatattcgtcgggtaccgaggcgcgcaaccggcgcatgttgggctggtgcttaacaggcaggcgctgcattcacgcggcgagaacggaagcgtgcgcatggactcgttgctggtcattcagcgggcattcaccaaagtggagtttttcgaatatggcgctggttgagatatcgaattttccaggaacgcctaagctgcgttgtagggtgccaaacggcacccttttttatgactggctggtggccaatgacgctactttccaccgcgacctgctgatcgtccgcaacggcgtaaggctgggcgacgatgatgagctggcgtttgagctgagcgagctggaccacatccagattttcgaccagccaaagggcattgtcggcgacatcctgagcccgatctttaaagtggttggccaggtattttnnnnnnnnnnnnnnnnnnnnnnnnnnnnnnnnnnnnnnnnnnnnnnnnnnnnnnnnnnnnnnnnnnnnnnnnnnnnnnnnnnnnnnnnnnnnnnnnnnnnnnnnnnnnnnnnnnnnnnnnnnnnnnnnnnnnnnnnnnnnnnnnnnnnnnnnnnnnnnnnnnnnnnnnnnnnnnnnnnnnnnnnnnnnnnnnnnnnnnnnnnnnnnnnnnnnnnnnnnnnnnnnnnnnnnnnnnnnnnnnnnnnnnnnnnnnnnnnnnnnnnnnnnnnnnnnnnnnnnnnnnnnnnnnnnnnnnnnnnnnnnnnnnnnnnnnnnnnnnnnnnnnnnnnnnnnnnnnnnnnnnnnnnnnnnnnnnnnnnnnnnnnnnnnnnnnnnnnnnnnnnnnnnnnnnnnnnnnnnnnaatagcctgaccggtcagacaaacacggcgcgcgtatataaggccaaaccggacatctacggccagattcgttcgttcccggatctgattcaggagtcggtgttcgaatacgtgcaccagacgtccaccgacggcggcctgaagtacgttacagagtggatgtgcatcgggatcggcaagtacgactacgagtccgtgcgctactcagaatccagtctgggctctctggccggcgccgagttccagttcttccagcctggcgaagtaatcccgcagatcgtcgaaggctacgggttcgatgacgttgacggtcaggaggttcccgggcagaacgaagccagcgacttccctatcgaaacagcaacggcaaacacggtggtcagcggaacgtattctggcggccagatagcgatgaaaatcgttaagcaggctgagttcgactatttcatggggctggttctgccgcacgctgtaaccttcaccatcaatgtgacgtatagcacggcctccggcatcgtgactaccgatgcgacattctccggcacgctgatctccgccgttgaaacaaacgacggcgcggttgttaacccggtgcgctggtacacgtttacgatgaaccagctggaggggccgcaggacattccggctaacgccacgatcaacactacgaagttcatcctgaacgataacgaggcgctggtagtggggccgttcttctctccagttgagtcaacccagctgtggcttcatacccagtccagcctgggcggcaagaaagaaacgaactggaaggtggtcatctggaaaatcgacgacgactacaaccaagtgccgggcacgcagcagaccttcacgtaccgacagacgacgccgcaccagtcgacaagtgaagtcttctaccgcaccgacaaaatcacacccaccggcggcttcgggaaatacgctgtcagcttccagcgcactgacaactccggcgacgcgtcactgctgaaggtcgaagagatccacagcattaacatccgtacgaatgtcgtccacccgaccgatacgctggtgcgggtgaaggtgagggcgactgagaatgctcttggcagccgtgagcgcaaatataacgcgctggtgacgcgtcataccatcacgtacgacctcgacacgcagacggtggattacacgctgcggccgtcgcgctcgttcgctgatgcagtggctcacacctggctcatgatgggcgagcagccggtgagcagcattgacctgtacgggctgtactcgatcgccgaaagtctgcctgacgagcgcctcggctacttcgattacacgtttgacgacgagaacgactcactgggcgaccgcgttcaggcgatctgcaatgcggcgtcggtgattgcgtactgggatgacggtgtgctgacttttactcgcgatcagaaggttgactacccggcggccgtattcaaccgggccaacatgaagacggacgagtacaaaatgacgtacgaggccacgcttcctggcggctacgatggcgtacaggtgtcctacgtccacccggccacgaacaataagacgtacatcaactaccgcgtgctgaacggcgccatcatcgagcaggaagcggaaaacccgaacaagctggagatagtcggctttcgcaacgagtatcaagcccgtgagcgcgcgcttcgcgaaaccaagcgtctgatctactcgcgagtgaagatgaacgccaaagtgtttgaggacggcattatccaggtcggtagcgttattcaaatgcccgacatctacgacagcaaccagcagcagggttacatcaccggacgcgccgggaataacttcgataccagcgagccgatcgcgtttaccggctcgatgtatgtgctggtgaccgacagtctgggcaatccgacattgcgctatccggcaaccgcccgcagcgacacgaagtatggcttcaccgcggctatccccaacattcagctcaacatatggaacggagacactgtgcagctcccgtcgcgctatctcattgcgacagtggaggaactggacagccaactatggacagtcaacagcatcaaaccgaacacagataatacggtttcactgacggtcgcggagtacagcgacgccatctacgaataagccccatcccaacaaacaacacccggcctcgcgccgggttttttatggaataaatatggctactacacctaccaacctgcctgtgccaagtgaatcacctatcgaccttaagtttaatgcagggaaaattgatgaatttgtcacgtctatggggtggacctataccgatcgcttcggtcagaagcactacactattgaaggcattaattaccttgcccagcaggcaatggcagcgttcggctatgtgatcctcactggcaaaacgtttaccactggcgcaacgataaacaacccgaacgaagttctgctgaatacagctgatggggaatactacaaatggaccggttcatttgcatcaggtccaaaagtggttcccgctaactcaactccggcgagtactggcggggttgggccaggtgcatggattggtgtcggcgatgcttctcttcgtgcagcactggcatcgtcatcaggtgccagtatggtcggatataaaaacaaaggggcttattcggtccagcaaacagtgaaagataagctcgatcgcatttactatgccagtgattacggcgttctgacgactaacaccgccgctgtaaacacgacgaatttgcagaacatgctgaacgacctttccggtaagtccaccattacgagaatcgtgtttgcagatcagggtactgtttttgttaacgggccaatcacagttcctaataacaccgacatcgagattaaggccggggttacggtttcaggagcttcaggcaatctgaagccagtgtttgtaagtgagaaatgggcatatgttctgtcaaacaggacagtgtctggtgggtttgcttcaaacacatccgatctaggtaaccgttcagattatattgggatctggggtggcgggaccgttgactacaactattcgaccggaggggcggcgaacgggctggaaatgcattgcatctgcatagcatcagtcgctcgggttaaattaggtggcggccttgagattaaaggggcaattaaatattcatatcttgttgccaacgttcaatatcttgatgctcaagggcttcgttttaataacaactctgatggtttgcatctacagccacccatcgattacgcatacgtaagggacctgtatggaactactggtgatgacatgttcgccatgactggtggcgactatcttgattacgatctgggtctacgcggaacgtttaatcatatcgatgttaagggcatttatggcattaactctttatgtgcagtaaaagttgcaggaaatagctctacccctgttcgaattccgaacctgcaaggataaagtgaaaattatttactgaccgctcattttccaggcaaatcacatcccagacctcaattttcgcctggtttttaaacaaaaacgagccgcaagcggcccgtttttgcgttttgtgacttactgcactgccacaatgcgatcgtcgttggcttccagacgaataactttgcccggaaccagctccccagagaggatttgctgtgccagcgggttttcgatctgctgctggatagcacgttttaacggacgcgcaccataaacaggatcgtaaccattctcgctcagcagtttcagcgcatcgtcggaaatgtggatttcatacccacgctcttccagacgtttgtacagacgctgcaactggatctgcgcaatcgacgcgatgtgtttctcgcccagcggatggaacacgaccacttcatcaatacggttgatgaactccggacggaagttttggctgaccacacccagcaccagatctttcatatggctgtaatccagctcaccgaagcgttcctgaatcaaatcggaacccaggttcgaggtcatgatcaccaccgtgttacggaagtcgaccgttcttccctgcccgtccgtcagacgcccatcatccagcacctgcaacagaatgttaaacacgtcaggatgagccttttccacttcatccagcaggatgacggaataaggacgacgacgaaccgcttccgtcaggtaaccgccctcttcataaccgacatatcccggaggcgcaccgaccagacgcgagacggagtgtttctccataaactcggacatatcgatacgcaccatcgcgtcatcgctgtcgaacataaagttagccagcgctttacacagctcagttttaccgacaccggttggccccaggaaaaggaacgagccgattggacgattcggatcggacagccccgcacggctacgacgaatggcgttagataccgcttcgaccgcttcgttctgtccaatgacgcgctgatgcagatcctgctccatacgcagcagtttctcacgttcgctttccatcatgcgagccacaggaatgcccgtccagcgcgccagcacttcggcaatctcggcatccgtcactttattacgcaacagacgcatggttttgccttccgactgcgtggcgatctcaagctgtttttccagctcaggaatcttgccgtactgtagctcggacatccgcgccagatctcctacgcgacgggcctgctcaatggcaattttcgcctgctccagctccgccttgattgtctgggtgccagagagggaggctttctcagctttccactcttcttccagctcagaatactgacgctctttctcgtccagttcttcgttaagcatatcgaggcgtttcttactcgcttcgtcagactctttgttcagcgcctgctgttccagcttgagctggataatgcggcgatcgagtcggtccagctcttccggtttcgagtcaatcnnnnnnnnnnnnnnnnnnnnnnnnnnnnnnnnnnnnnnnnnnnnnnnnnnnnnnnnnnnnnnnnnnnnnnnnnnnnnnnnnnnnnnnnnnnnnnnnnnnnnnnnnnnnnnnnnnnnnnnnnnnnnnnnnnnnnnnnnnnnnnnnnnnnnnnnnnnnnnnnnnnnnnnnnnnnnnnnnnnnnnnnnnnnnnnnnnnnnnnnnnnnnnnnnnnnnnnnnnnnnnnnnnnnnnnnnnnnnnnnnnnnnnnnnnnnnnnnnnnnnnnnnnnnnnnnnnnnnnnnnnnnnnnnnnnnnnnnnnnnnnnnnnnnnnnnnnnnnnnnnnnnnnnnnnnnnnnnnnnnnnnnnnnnnnnnnnnnnnnnnnnnnnnnnnnnnnnnnnnnnnnnnnnnnnnnnnnnnnnnnnnnnnnnnnnnnnnnnnnnnnnnnnnnnnnnnnnnnnnnnnnnnnnnnnnnnnnnnnnnnnnnnnnnnnnnnnnnnnnnnnnnnnnnnnnnnnnnnnnnnnnnnnnnnnnnnnnnnnnnnnnnnnnnnnnnnnnnnnnnnnnnnnnnnnnnnnnnnnnnnnnnnnnnnnnnnnnnnnnnnnnnnnnnnnnnnnnnnnnnnnnnnnnnnnnnnnnnnnnnnnnnnnnnnnnnnnnnnnnnnnnnnnnnnnnnnnnnnnnnnnnnnnnnnnnnnnnnnnnnnagctcataacgccctttcagaccacgcaaaatagcgatggtatcttcaacgcttggttcagcgacaaacaccttctggaagcgacgctccagcgcggcatctttttcaatgtactgacgatactcgtccagcgtagtggcgccgacgcagtgaagttcaccacgcgccagcgcaggtttcagcatgttcccggcatccattgcgccgtcagctttacccgcgcccaccatggtgtgcagttcgtcgataaacaggatgacgttaccttcctgtttcgccagatcgttcagcacgcctttcagacgctcttcaaattcaccgcggtatttcgccccggccaccagcgcgcccatatccagcgccagtacgcgacggcctttcagcccttcgggcacttcgccattaacgatacgctgcgccagcccttcaacgatggcggttttaccgacgccaggctcaccaatcagcaccgggttgtttttggtacgacgttgcagtacctggatagtccgacgaatttcttcgtcacggccgattaccgggtcaagtttgccctgctcggcacgttcggtcaggtcgaccgtaaatttcttcaaagcctgacgttggtcttcggctccctggtcgttcacgctttcacctccgcgcattttctcaatcgcctgggtcacattagcggtggttgcaccggcggatttcagcaggtcggttaaggtaccgcgtgattcaagcgccgccagaacaaacagctctgacgaaataaagttgtccccacgtttttgcgccagcttgtcgcaaaggttcagcacgcgcaccagatcctgcgacggctgcacgtcgccgccggtaccttctacctgcggtaaacggctcagcgcctgatcgatggcggtgcgtaactggccggcattaatgccagcggacgttaataaaggacgtaccgatcccccttcctgattcagcaaggcgctcattaaatgaagaggttcgataaattggttgtcgtgccccagtgcaagggactgggcatcggcgagagcaagctggaatttattagtaagacgatccagacgcataactcctcccataacaggtcaaatttgctactggagattaaatgaggtcatccctcaattattcaaggttaataacctgaattatgtgaaaagaaaacggcgcgtaccggatcgtcttgattctttaggttatatcagccaaatgaaacttgccatacgacctgtcgtcttgtcgcggcgataggagaaaaaatcacccttttcggtgaaggtacagcgatctccgccgaagatgtgggtcacgccgacgttattcaggcgctggcgggcaagctgataaatatcggccagatatttatctccggaagccacaaacgcttcgaccgcttgcggatctttttccataaaggcatcccgcacttcgggccctacctcaaacgcctgcgggccaatcgccgggccaagccaggcgatgagatttgcagaatcgtcatggaagcaggcaacggtctcttccagcacgccttcgcacaggcctcgccatccggcgtgggcagcagccacttcagtccctgcctgattgcagaacaacaccggcaggcaatcagcagtcatcaccgcgcaaaccgttcccggcgtattgctgtacgaagcatcggcgcgcttagacgcatagggctcccccgtcagcttcagcaccgctttaccgtgcacctgctcaagccagaccggttttgaaggaaggtttcccgcagcaaagaggcgtttacggttctcttcaacgtgctccaggttatcaccacagtgcgcaccgaggttcagtgactcccacgcgccctggctcacgccaccgatacgggttgaactacaggcggccacgccttcaggcagtggccactccgggacaatcagtttggtcataaccagtccacgtgatccttatgttcttcgaaatctgcgcgcatcgcgtcgataagttccaccatatcctgtgggatcggcgcatgccattccatctgaattccggtgattgggtggtaaagacgcagcatcgtcgcatgcagcgcctggcgatcgaatttacgcagcacggagatgaattcatccgatgcgccctttggtggacgcggacgaccgccgtaaaccgggtcacccaccagcggatgggtaatatgcgccatgtgcacgcggatctggtgagtacgcccggtttccagacgcagacgcaggcgcgtatgaatacggaaatgttccatgatgcggtagtgggttaccgccggtttacccatcgggtgtacggacatatgcgtacgcttggttgggtgacggctgataggctcttccaccgtgccgccagaggtcatatgaccaatcgccaccgcttcatactcacgggtaatttcgcgcaattgcaaagattccaccaggcgagtctgagctggaaccgtcttcgccaccaccatcagacccgtggtgtctttatccagacggtgaacgataccggcacgcggtacgtcggctatcggtggataataatgaaggagagcgttaagtaccgtaccgtcaggattgcccgcgcccggatgaacaacaaagtcgcgcggcttgttgatgaccagaatatcgtcatcttcgtagacgatatccagcgggatatcctgcggctcgaagcggacttcctcttcgatttcagcattgatggcgacagcttccccaccaaacactttctcttttggtttgtcccagatcttgccgtttaccagcacgcgctggtcaaggatccattcttttatgcgtgaacgcgaataatcagggaacaattcggccaaagcctgatctaagcgttgaccgagctgattttcggagactgttgcggtgagttctactcgttgtgccataaactgcttcttcgtttaacgttgggttttacggctttgccgtttaatatagtgtgctattgtagctggtcttaatcgggagcaggaactgagtttctcccggacaaacatttgaggaaagtcaaaacgtcatgacgcgcatgaaatatctggtggcagcggccacgttgagcctggctttggtgggctgctccggttcgaatgaacaggtccctgacaatccgccgaatgaaatctatgcgactgcacaacaaaagttgcaggacggtaactggaaacaggcgataacgcaactggaagcgttggataatcgctatccgtttggcccgtattcgcagcaggtacagttagatcttatctacgcctactacaaaaatgccgatctgccgctggctcaggcaaccatcgatcgtttcatgcgtctgaaccctacccatcctaacatcgattacgtgatgtacatgcgcggcctgactaacatggcgctggatgatagtgcattgcagggcttcttcggggtggatcgttccgaccgtgacccgcaacatgcgcgtgatgctttcaatgacttctccaaactggtgcgtagctacccgaacagccagtacattaccgatgccactaagcgtctggtattcctgaaagatcgtctggcgaaatatgagtactccgttgcggaatactacacccgccgtggcgcatgggttgccgtggttaaccgtgtagaaggcatgctgcgtgattatccggatacccaggccacgcgtgatggcctgaagctgatggaaaatgcgtatcgccagatgcagatgacggctcaggctgacaaagtggcgaaaatcatcgccgcgaacagcagcaacacctgataccgctacaacgcataacggcagcccgcgggctgccgtttttttattctttcacacttacgctgaagcggtttagcttcaacacatccattcaactatgaccgcaattgttggcttcgacaaggtaaatctcacctcttcctgccctgcctcacaaaaaagattccctgacaaaaaccgacaaaataacgtgatctaaatcacacattttgacattaggtcgggtatgctggaatcaccaagacggaaagacaagaggtaaaatttatgacaatgaacattaccagtaaacaaatggaaattactccggcaatccgccagcacgtcgcagaccgtctcgccaaactggataaatggcaaacacatttgattaatccacatatcatcctgtccaaggagccgcagggtttcatcgctgatgcaactatcaatactccaaacggccatctggtcgccagcgcaaaacacgaggatatgtacaccgcaattaacgatttgatcaacaagctggaacggcagctcaataaagtgcaacacaaaggtgaagcacgtcgcgccgcaacctcggtgaaagacgccagcttcgcggaagaagttgaagaagagtaatcctctaaaattgagtgtaccgacaacgcgccttcgggcgcgttttttattgacaggatcaaaacagtgcaggtactttaaccctatcaatttcaggatgaccttatgaaacagacgccgtttttcttcgcattcttttttaccttcccctgaccgggaggcgtttcgtcgtgtgataaagaatgcgaagacgaacaacaaggcctcccacaccgggaggccttttttattgataacgataaaatgagacagacaacactatgacaccggaaaacccgctcctggatttacgcgtaaaaatcagtgcactcgacgaaaaattactggccctgctggcagaacgccgcgcgctcgccgttgaagtgggcaaagccaagctcgagtcccatcggccggtgcgcgatatcgatcgcgaacgtgatttactggaacggttgattcaactcggcaaagcgcatcatctggatgcgcactacatcacccgcctgttccagctcatcatcgaagactccgttctgacgcaacaagccctgctccagcagcatctgaacaaaaccaacccgcactctgctcgtatcgctttcctcggcccgaaagggtcctattctcacctggcagctcgccagtacgcagcccgccatttcgaagagtttattgagagcggctgcgcgaaatttgcagacatcttcaaccaggtcgaaaccggccaggcagattacgccgtggtgcctattgagaacaccagttccggcgccatcaacgatgtttacgatctgctccagcacaccagcctgtcgttagtcggcgagttgactatccctatcgatcactgtgtgctggtctctggctcaaccgatctgagtcagatcgaaacggtgtacagccacccgcagccgttccagcagtgcagccagttcctgaaccgttatccgcactggaaaattgaatacaccgaaagcacctcggcggcgatggaaaaagtggcgcaggcaaactcttctgccgtcgcggctctcggtagcgaagcgggcggcgcgctgtatggcttacaggtgctggaacgcaatctggccaaccagacgcagaatatcacccgtttcgtggttctggcccgcaaggccatcaacgtgtcggaccaggtcccggcgaaaaccaccctgctgatggcgaccggccagcaggcgggtgcgctggttgaagcgctgctggtgctgcgtaatcacaacctgatcatgacgaagctggaatcccgcccaatacatggcaacccgtgggaagaaatgttttatctcgacgttcaggccaacctggagtctgcgtccatgcagaaagccctgcgcgaactgggcgagatcacacgctccatgaaagtgctgggctgctatccgagcgaaaacgtggtcccggtcgatccggcttaacgttcgataaagcggcttttcttcatccctgccacatttacaggcagggtgaagatggcaccggaaagcggatatttcgccagctcctccgcctccatattttcccgcgtggtggtgataaacagcgttttcatatcgtcgccgccaaagcagaccattgtcgggcagcgtaccggcagccgatactcttccagctgttcgccttgcggtgaaaaccgtgcgatacgccagccgtcaaacagtgcgctccagtagcagccttcctcatccattgccgcaccgtcgggtataccttctccctcgctaaaccggcgaaactcttcgcgcttaccgggttccccctgctcatcaagcggcgtacggtagatcacaccgttcggcgtatcagaagtaaacatccaccgtttgtcaggactaaacgctaaaccgttatgcccgtgaatatcgcactggatcactttcggcgtcaggtcgttgtcgatacgcatcagcatggcgccgttataatctcccggcccccagaaggtgcccgcataaaaccgtccctgatgatcggtaccgccatcgttaaagcgtgcaagctgcgggttggatgggttatcgcaaactttacgctgtagcaggccgtgcttatcggtcagccagatggcgtttcgcatcgcgacgataaatccgccgcgttcacgcagggcaaaacacccaacttcttcatggaatgagagcaccgagtgctctgcggtgggcagatggtaccgatggatctccccttccaggatatccgcccagtagagcgccttctcgtctgcactccacgtcgggcattcgggcagatgcccggtatagttcaacagcagctgcggttcagccatgacagttccccaaaatgaaaaaagccagcaatgctggctttcagtatatacatcatcgcattactggcgactgtcatttgcctggcgcaacagcgtgcggctttcactctggaatcgcgtggcgtaatcaccgaaccagtgctccactttacggaaactgtcgataaaggcttgtttatcgccgtgttccagcaaggtgatcgcttcgccaaaacgctgataatagcgcttgatcagcgccagattattttcagacgacatgatgatgtcggcgtaaagctgcggatcctgggcaaacagtcgcccgaccatcgccagctccagacgatagattggcgaggaaagcgccagcaattgttcaagctgaacgttctcttccgccaggtgcagcccataggcgaaggttgcaaagtggcgcagcgcctgaataaacgccatgttctggtcatgctctaccgcgctaatgcggtgcaaacgtgctccccagacctggatctgttccaggaaccactggtaggcttccggctgccgtccgtcacagtaaaccactacctgcttcgccaggcttccgctgtccgggccaaacatcgggtgtaacccaagcacggggccagtgtgcgccgccagcattgcctgtagcggaccatttttaacggaggccaggtccaccagtatgcaatcttccggcagcggaggaagtttcgcgattatttgctccgtcacatggatcggcacgctgacgataaccattccggcgtctttcatcagctccggcgcgtgcgaccagtcctctttctccagaatacgcacctgatagccagaaagcgtcagcattttctcaaacagacgccccatctgcccgccaccaccgacgataaccaccgggcgcagcgacggacagagggttttgaagcccttgtcgttttcgctggaataggactcccgcatcacgcgacgcaggacgtcctcaatcaaatcaggtgatacgcccagggcctgcgcctctttacggcgggaggcgagcatagaggcctcgcgctccggaacgtaaatcggcagtccgtatttacttttaacctcgccgacctcagcaaccagtgccatgcggcgcgccagaagatccagcaacgccttatccacttcatcaatttgatcgcgtaatgcggtcaattcagcaaccataactaccctcttatgccagacgcgtcgccagctggccgttcaaatctttgtggatctcacgcagcagcgcatcggtggtttcccagctaatgcaggcatcggtgaccgagacgccgggcttcatcgcgctacgcggctgttccgatgactgattgccttcatgaatattactttcaatcatcaggccgataattgaacggttgccatctttaatctgagcaatcacagattctgcaaccgcaggctggcgacggtaatctttattcgaattaccatgactgcaatctaccatcagcgccggacgcagtcccgcctgttccatctctttttcacactgcgcgacatccgccgggctgtagtttggcgctttaccaccgcgcaggatcacatgcccgtccgggttgccctgcgtttgcagcaggcatacctggcccgcctggttgatcccgacaaaacgatggggcatggcggcggcgcgcatggcgttaatcgccgtggccaggctgccgtcggtaccgtttttaaaaccaaccggcatagacaggccagacgccatctcgcggtgggtttgtgactcggtggtgcgcgccccaatcgcagaccagctaaacagatcgccgaggtactgcgggctgttcggatccagcgcctcggttgccagcggcagccccatgctgaccagctctaccagcaggcgacgcgcaatcttcaggccggcttccacatcaaacgagccatccatgtgcggatcgttgatcaaccctttccagccaacggtcgtacgtggcttctcaaaatagacgcgcatcaccagatagaggctatcgctgacctcctccgctaatgctttaaatcgacgagcgtactcaatggcggtttcaggatcgtgaatagagcaaggaccacataccaccagcagacgcggatcgcggccagcgataatgtcagaaatggtctggcgcgagtgctcaatctgagcttcctgcgcgacgcttagcgggaattccgccttcagttgatccggggtgattaacacctgttcgtcagtgatatgtacgttgttcagcgcgtctttttgcatgattgcgatcctgtcaaactcgtttgcgatagtggttttcctcgaagaggtgacacaacgatatcacattaagtaaagatttcaatccaaaatacgtacacattactttacaccaaccctttaattgcaaaagtcatggcctaaaatcgtaaagttaaaattacacacgcacgcctgtaagtcaggctatgctcacaaaaaggagaatagccatgcgttcaattatttttatgttgttgtcgctgattttgtcgggttgccagatcaatccttatacttttcagcctgactggaccagcccggactggttcacggccggtaaagaagacgctatgaatggtgttccggttaaagataaccaggctctggccgatagttttaatgaccctcaggttgatcgagcgaaatatcttcgtggctacgctaacggacagaaaaaaatatgcgaagagggctttattcacgcctggggattagcgggcaaatcatttcctgccagctgcgatgcaactgaaaatgcagtaaaactgcatgaatcctggcaacaaggattggatgaaagtatgcgttccagcaggcttaattgagcctgccttaattcctctgaatatagctcactgtaagatttagcttaggtcaaaacagggatatttctgacataatgacggctttgataaacaatggtattctgccgacaattcttaaggacatctatttccggggcggtttggcggattctgatgagaaatgcaatcttgatcgctttgctccgactccccctggtgctaatactgttcattttagtagcccctgcaacggcaggctcgttcacggaaacggataaatcagtacgttcgattgtttctggcattgtgagctacacccgatggccagcactgtccggccagcctaagctctgtatttatgcctcttcccattacagacaggcgctcagcagtgaagatgaacacaacccgttgccctatagtcctgtcattgtgcatagcgatcgggaagcactcgcagcaaggtgtgatgccctctatttcgggagcgagtcgccggcaaaacaacaggaaataataaatcaatatcagggccaggcgttgctattaatgtcagaacaaaatcctgaatgcgttattggcagcgcattttgtctgataatagagcacaacctcgtcaggttttccgtaaatctggatgcgctggcgcgcagtggcgtaagagtcaatccggatgtattaatgctcgcacggaataagaagcatgaataaggaagtcgcaccaacaccgcgtccgacgtttaaaagaacgttgcgacgaatcagcatgataagcgtcattataacgatgacgtttatatggttgctgctgtgtttcgcttccgtggtgacattaaagcaatacgcgcaaaaaaacctcgaacttaccggcgccaccatgagccacagccttgaagcctctctggtgttcaacggtgccgtggcggcaaatgaaacgctggcgaccctcggcaagcaggggcagttcgccgtggcggaagtgcttaacgcacatcataaacggtttgcctggtggtcatggaacccggcggataataccgacacgctgggcgcgctggtcaaccggtggttgttccctgttcctgtcgcacagcccatcatacataacggcaatgtgattggcgaaattcgtctgaccgcgcgagacagcctgattagccactttatctggctctcatttgcggtcctcaccggctgcattctttttgcctctgccgtcgcattgaccatcactcgctcgctacatcatggcatggttgttgaaatgcaaaacatcactgacgttgtgcatgacgttcgcactaaccgcaacttctctcgccgggtaacggaaggccgcattgaagagttccaccagtttggtgaagacttcaacagcctgctggatgaaatggaagagtggcagctcaagctacaggcgaaaaacgctcaactgttgcgtaccgccatgcacgatccgctcacggggcttgcaaaccgcgccgcgtttcgcaacaacattgcggcattaatgaacgacgcttcagcaaaaaccaattctgccctgctcttcctggacggtgataactttaaggttatcaatgacacctggggtcatgccgcgggtgactgcgtactgatcgaagccgccaaaaggatggtcgagtttggcgaaaaacgtcatcagtcttaccgtcttggcggcgatgaatttgccatgatcctttacggcgtccacaccgcacgtgaggtcgaatttatttgcgctgctctgtcgcagcaatttatccgtccgtttgatctgcataacgggcacacagcatcaatgtccctcagcattggctttgctctggcgtgggaaaatgcctccgttgaagcattactggagcaagccgatcgcaatatgtatctggtcaaaaaccagcgttcgaaaacaatatcctgaaaggaagacgatatgttaaagcgatactttgcgccgttaatactggcatcactggtaatgtccggatgccagtcatcccctgaagggaaattcacgccagagcaaattgcggccatgaaatcctacggctttaacgaactgaatggcgactggtctctgggcctgtcggataagatcctgtttgataaaaatgacgccaggctgcgcccggaaagtgaaacgcagatccagactatggcctcacgcctggcggcaaccggtctgaaccacgccaggatggatggccatacggataactatggcgaagagagctacaacgaagcgctttcgttaaaacgtgccaatgttgtggcggatgcctgggcgaagggcgcgaatatcccgcgcagcaatctcactacgcggggcttaggcaaaaaataccctatcagcagcaaccgcactgcgcaggggcgagctgaaaaccgccgggttgcggtagtcatcagcacgccttaaggctatttaacggctgttccggcgagcgacacgcctgaacctgctcgccagcgcagccagtcaatcacaataaagaccgccagactgacgcccattaccggcaacgccagccccagcaggaggcttatcaggaacgtcattccccttccccacagcggcaatgccagccagctttggcagagcgtctgtaccggattcgcggctgacgttgcagggcgacgcatccaccacatccggtatccccagataattaacacacacagcgcaacgccaaacgcgatgagcagcagctgatttgccagaccaaacaggatccccatatggaaatccacgccccagcgggtgagtttagccatcagcgggaaatccccgaagcgagtgctgtccagcaccttcagtgagtggggatccacggcaacggcatcaacctgcgttggccagcggcgatcgatttccgtcaccgtccaggcctggtcgaccctgcttgccggacggatctcaacgttgttcgcatcaatccctgactggcgggcgacctgcaatacgttgtcaaaaagcgacagtttgactggcatttcaggcatcgtcattcccccgtgatgaccacgatgttcggcgtgttcatccctcatttccggcgcaccggaaagggtggtatttacctgcggcgtcagccagttcatctctgcacgcagcttatcgacgttgccaccggcccattgtgaccaggttaacccggtgactgagaacagcagcattcccgccagtaacgtccagcctaagatcacatgcaggcgacgacgattctggaaacgattgttaatacggcgcttcggtcgggtgtagaaccacagcgcgatcccgcccagggcagcaacccacatccacgaggcggctaactcgctatagaggcgcccgatgttgcccagcatcagcgaggtatgcagataatcgatagtctgacgcagcggtaaaatcccgctggtgccgtacacggtcatatcccctcgaatctcaaggctggtgggatcaataaaaatagcccgatgctcggagggacccagcgccgggtcggcaaacatcacgcgggtcgtttcgccctcttccagccccggacgtacagcatgtaaacgcagcgctgaacccacggccttttccgccacggcaatttgttcagcaagaggctgcgcctcacccacggcatccgtgtggagtgcatgatggtacagcgccttttcaagctgcggcgtggcgacatacagcgttccggtcagcgctgcgaagaagataaacggaccgacaaacagaccgatatagaaatggaggcgacgcagcaggtttccccatgccgcgcgcggagtgcaggtagtcatacttttcctttttaaggcaaaaagagagtgattttgttttaaagggagaaagcagaccgacgcggcggcgcgcgggtatcggggtaaagccaggggaaaaagtgccagtggctgaccgcctgacgaggcggtttcacgcgcagccgctgcaacaccacgctgagcagaacgataagcgccagcatcacgcccggcacatgcgctaacagcacgcagtagccgcatgcttcagcatggtcaactggcatagaatgcggcatatcactatgatgctcgtccatcgacatcatgctcatgtcatggtgcatacccggcatggcgctcatgggatctttttgcagcgagacggagatcagcggcgccacgacgatcagcaggatcgcaaacagcgcggtcaatgccgctgcgcgtttccagttacgctgatgcagtacgttatccacttatcctccacccaagaggcgaacattgtaaatgatttatgacggaagggttaacgcgagaggtgcgatgggataaaaaaagggccagcctttcggccagccctttctaacaggatgtcgcttaagcgaatcttagttcagacgctctttaatacgagcagacttaccagtacgctcacgcaggtagtacagtttagctttacgtacagcaccacgacgtttaacagcaatgctgtcaactaccggagagtgagtctggaagacacgctcaacgccttcgccgttggaaattttacgaacagtgaatgcagagtgcagaccgcggttacgaatagcgataaccacgccctcgaatgcctgcagacgttttttggaaccttcaacaacccatactttcacttccacggtgtcacctggacggaaggaaggtacgtcctgcttcatctgctcttgttcaagttgcttaataatgttgctcataatttaatctcttatcctgggtaaactgatattcgggtgcgtattacgcattcccatcatgttcatgctgctggtgcacgtgttcagttttgaactcggccagcaactttgcttgctcttcagtcagagccaggttttccagaagttcaggtcttctaagccaggttcggcccagcgactgcttcaaacgccagcgacgtatctcggcatggtttccagacagtaacactgccgggacttccatcccttctaacacttcaggacgagtatagtgtggacagtccagcaacccatcggcaaaggaatcttccgttgccgaagcttcatggcccagaacccccggaataaaccgggcgacggagtcaatcagcgtcattgccggtaactcaccaccgctgagaacgtaatcgccgatagaccattcttcgtcaatctcggtttgaattacgcgctcatctatcccttcgtagcgaccacagaccaaaatcagcttttgattcgtcgccagttcgctcacgcccgcttgatcaagcttgcgtccctgaggtgacagataaatcaccttcgcgccttcacctgccgcggcttttgctgtgtgaatggcatcccgtaagggttgcaccatcatcaacatccccggtccgccgccgtaaggacgatcgtccacggtacggtgccggtcgtgcgtgaagtcacgaggactccagctctggatgctcagcaggccattctttactgcccggccagttaccccgtaatcggtaatcgcgcggaacatttcaggaaacaggctaattatgccaatccacatagcgccgtcttttaccgtttatccggagaatttaaaaaccaggatcccaatctacttcaatggtttgagtagtgagatcgactttcttgataacctgtccatcgaggaacggaaccaaccgctccttgatgccaaatgcatctttcaggtttgccttaatgacgagaacgtcatttgacccggtttccatcatgtcgatgactttccccaggctgtagccttcagtggtcactacctggcaacccataaggtctttccagtagtagtcaccctcttccagctgtggcaactgcgacgaatccacgacaatttcacaattagtcagcgcattcgcggcatcacgatcgtcaatgcctttcagcttgatgatgatgtcctgattgtggtgacgccagctttccagctcgacctcttcccacttaccggctttctggataaaccagggctggtaattaaaaatgctatcagcgtcttcagtggaggaaaacactctgagccaaccacggataccgtagcaagaacccatttttcccaatacgatcggttcaacaggtgctttattgctcatcatgaccaccgtgacagattaagctgctttgtttgctgctttgatcagcgtagcaacgcgatcggaaacagtagcgccctggccaacccagtgagcgatacgatccagatccagacgggtttcttcttctgcgccagcggccagtgggttgaagaaaccaacgcgctcgatgaagcgaccgttgcgtgcattacggctgtcagtcacaacaacctggtagaacggacgctttttagcgccgtgacgagctaaacgaatagttaccataacatcctcttgtgtgaataaaacaaccgggccccatcgaggaacggagcccgggtgtcatattaaaagcccgaaaattttactcattttcgggcaaaaagcaatctcaaaagcgattaacgcccaggaaaaccgggaggcatcatgcctttcatgccgcgcatcatcttcgccatgccgcctttcttcattttcttcatcatgcgctgcatgtcgtcgaactgtttcagaaggcggttaacgtcctgcacctgcatgccgcaaccggctgcgatacggcgtttacgggaacctttgatgatttctggcttcgcgcgctctttcagcgtcatcgagttgatgatggcctccatacgcaccagcactttgtcatccatctgggatttgacgttgtccgggatctggcccatgcctggcagtttgcccatcaggcttgccatgccgcccatgtttttcatctgacgcagctgctcaaggaagtcggtcagatcgaaaccgtcgccttttttcagcttgctggcgagtttttccgcctgcgcgcggtcaaccttgctttcaatatcttcgatcagcgacagcacgtcgcccatgccgaggatacgggaagcaatacgatccggatggaacggctccagcgcttcggttttctcgcccacgccgaggaacttgattggcttaccggtgatatgacgaatagagagcgccgcaccgccgcgggcatcgccgtcgactttggtcagcaccacgccggttaacggcagggcttcgttaaacgcttttgcggtgttcgctgcatcctgaccggtcatggcgtcaacaacaaacagggtctctaccggattgatagaggcatgcacctgcttgatttcgtccatcatcgcttcgtcaacgtgcagacgaccggcggtatccaccagcagcacgtcgtagaatttcagcttcgcctctttcagcgccgcgttaacgatatcgacaggcttctgcgccacgtcggacgggaagaagtctacgccaacctgctcggccagcgtttccagctgtttgatcgccgccgggcgatacacgtccgccgacaccaccagcacctttttcttgtgcttttcgcgcaggaatttccccagcttaccgacgctggtagttttacccgcaccttgcagacccgccatcagcacgacggccggcggctgagccgccaggtttagcacctggttctcttcgcccatcgccgaaaccagctcgttacggacgattttgacgaactcctgacccggagtcaggctcttgttcacttcatggccaaccgctttctctttcacgcggttgataaaatcacgcacgaccggcaacgcgacgtctgcttccagcagcgccatgcgcacttcgcgcagcgtttccttgatgttctcttcggtgaggcgtccacggccgctgatgttgcgcagcgtgcgcgacaaacgatcggttaaattatcaaacattgtctctcgcctggggtagaaacgttaggtcgcctgggcgacacatacacagaattttgccggagtataacatgaaggcgcctttgttgttatgcaacggttggagcaggcgtcacgtaacgttatactgcttctctttcttattaagacaactgtcgacgcctatatgcctgttttcgcactgatcgcccttgttgcctactctgtcagcctcgcgctgatcattcctggcctgctgcaaaaaaacagcggctggcggcgcatggctattctttcggcagtgatcgcactgattagccatgcgtttgcgctggaatcacgcatcattcccggcgacggcagcgtgcaaaatctgagcgtactgaacgtcggctcgctggtcagcctgatgatctgtacggtcatgaccattgtcgcgtctaaaaaccgtggctggctgctgctgccgatagtctacgcctttgcgctgatcaacctggcgttagccacgttcatgcccaatgagtttattactcacctggaagccacgccggggatgctggtgcatattggcctgtcgctgttctcctacgcgacgctgatcatcgccgccctttacgccatgcaactcgcctggattgactaccagctgaaaaataaaaagctggcgtttaaccacgaaatgccgccgctgatggtgattgagcgtaagatgttccacatcacccaggtcggtgtggttctgctgacgctgacgctgtgcacgggcttgttttatatgaagaacctgttcagcgtggagaatatcgataaagcggtcctctccatcatcgcgtggtttgtctatattgtcctgttatggggccattatcatgaaggctggcgcggtcgccgcgtggtctggttcaacgtagcgggtgcgggcattctcacgcttgcctattttggtagccgcttcatacagcaatttgctggctaagtaacaaaaggagttccccctggaacacatctctaccaccacgctgatcgtcattctggtcatcatggtggtcatctccgcttatttctctggctctgaaaccggcatgatgacgctgaaccgctaccggttacgtcatcgcgccaagcagggtaaccgtgccgcgcgtcgtgtcgaaaagcttctgcgtaagccggaccggctgattagcctggtgcttatcggtaacaacctggtcaatattctcgcttctgcgttgggcaccatcgtcgggatgcgtctgtacggcaacgcaggcgtggcgattgccacaggtgtgctcacgtttgtggtgctggtgtttgcggaagtgctgcccaaaaccatcgccgcgctttacccggaaaaagtcgcctacccgagcagcttcctgttagcaccgctgcttattctgatgatgccgctggtctggctgctgaatatggtgacacgggtgctgatgcgcatggtgggtataaaggcagacgtcaccattagtagcgcactcagcaaagacgaactgcgtaccatcgtgaatgaatcccgctcgcagatctcccgccgcaatcaggacatgctcctgtcggtgctggatctggaaaaggtcagcgttgacgacatcatggtgccgcgcaatgaaatcgtcgggattgatatcaacgacgactggaaggccattgtccgccagctgacacactccccgcacgggcgtatcgtcctctatcgcgattccctcgacgatgccatcagcatgctgcgcgtgcgcgaggcctatcgtctgatgactgagaaaaacgagttcaccaaagaggtaatgctgcgcgccgccgacgaaatttactacgtgccggaaggcaccccactcagcacgcagctggtgaagttccagcgaaacaagaagaaagtcggcctggtggtggatgaatacggcgacatacaggggctggtgacggtcgaagatattctggaagagattgtcggggactttaccacgtcaatgtcgccttcccttgcggaagaggtcaccccgcaaaacgacgggtcagtgcttatcgacggcagcgccaacattcgtgaaatcaataaagcgttcaactggcatttaccggaagacgaagcgcggacgatgaacggaatgatcctggaagcgctggaagagatcccggcggcaggcacgcgcgtgcgcattgaacagtatgatattgatattctggacgttcaggacaacatgattaagcaggtgaaggtcctgcccgttaaacctttacgcgaaagtatcgccgaataaaatgtaggccgggtaaggcgaacgccgccacccggcactacaggcagcacgttatgctttcgctttcgccacggtcaccatcgcagcgcgaatagtacgaccgttcagggtataccctttctgcatcacgcccagcacgttacccgcggcaacgtcttcggattccaccatcgcaatggcctggtgaacgtttggatccagcggtacatccgtatcggcaatcacttcaacaccgaacttacgcaccacatccagcatggatttcagcgtcagctcaatgccttcaatcatcgccgcgttatccgggttagctttatccgccacttccagcgcgcgatccaggctgtcgatcaccggaagcagttcgttgacgaatttctccagcgcaaatttgtgcgccttttcaacgtccagctcggtacgacggcgcaggttttccatttccgctttgatacgcagtacgccatcgcgttcgcgattctgcgcttctaccaactgagcttccaggttggcaattttttcatcgcgcgggtccacctgctcagcagacgtgtctggctctactgcctcaacttcatcgtgctgttccgtgataatttcttcaggggcttgcccctcaggcgttttctgttctttactactcatgaatttctccgcgtttttctgcattcatctcgctaacttcgcttattatggggatcagtttcctggattcaagggaacaaggcagattgtcatcattcatcaggcacaaggacctccagaaaatgaataatcatttcaggtgtattgggatcgtcggccatccgcgtcaccctaccgcattgacgacacatgaaatgttgtatcgctggctgtgtggtaaaggctatgaagtgatggtcgagcagcagatcgcccaggagttgcagcttaaaagcgtcagaaccggcacgctggcggaaattggccagcaggcggatctcgccgtggtggtcggtggcgacggcaatatgctgggcgcggcgcgaacgctggctcgctatgatattaaggttattggtattaaccgtggcaatctcggtttcctgaccgacctcgacccggacaatgcgcagcagcagctggcggacgtgctggaaggccactatatcagtgaaaaacggtttttactggaagcccaggtgtgtcagcaagactgccagaagcgcatcagcaccgccattaacgaggtggttctccatcccggtaaagtggcgcacatgatcgagttcgaagtctatatcgacgaaatattcgctttctcgcagcgttctgacgggctgattatttcaaccccgacggggtcaactgcctactcgctttcagccggaggcccaatcctgacgccatcgctggatgccattaccctggtgccgatgttcccgcatacgctctcggcgcgtccgctggtgatcaacggcgacagcaccatccgcctgcgtttttcccatcgccgtaacgacctggagatcagctgcgacagtcagattgcgctccccattcaggaaggtgaagatgtcctcattcgccgctgcgattaccatctgaacctgattcacccgaaagattacagctatttcaacacattaagctccaagctcggctggtcaaaaaaattgttctgattttgcatccagcactttactgtatataaaaccagtttatactgtatacaaacacagttatggtttttcatacaggaaaacaattatgctggcacaactgaccatcagcaactttgccattgttcgtgagcttgagatcgacttccatagcggaatgacggcgattaccggtgaaaccggtgcaggtaaatccattgccattgatgccctcggcttgtgcctcggcggtcgtgctgagggggatatggtgcgcacaggcgccgcccgtgccgatctctgcgcccgcttctcgttgaaagacacacctgccgccctgcgctggctggaagcgaaccagctcgaagacggacgtgagtgtttacttcgccgcgtcatcagcagcgatggccgctcccgcggttttatcaatggtacagcggttcccctttcccagcttcgcgagctgggccagctgctcatccagatccatggtcagcatgcgcaccagcagttaatcaaacccgaacaacagaaagccctgcttgatggctacgcaggtgagtacgcgcttactcaactcatggcggagcactatcgccagtggcatcaaagctgccgcgaacttgcgcagcatcagcagcaaagccaggagcgtaccgcgcgcgccgagctgctggaatatcagctgaaagagctgaacgaatttaacccgcaggcgggtgaatttgagcaaatcgacgaagagtacaagcgtctggccaacagcggtcagctgctttccaccagccagactgcccttaatatgctggcggatggcgaagacgtgaatttgcagagccagctgtataacgtgcgtcagcttgtgaccgaactgaccggcatggacaataagctttctggcgtactggaaatgctggaagaggccgcgattcagatttcagaagccggggatgaactgcgccactactgtgaacgtctggatctcgacccgaaccgtctgttcgagcttgagcaacgcatatcccgtcagatttcactggcgcgtaagcatcacgtaaccccggaagagctgccgaattactatcagtctctgctggaggaacagcagcagctggacgatcaggccgattcccttgaaaccttgtctctggcggttaatctgcatcatcagcaggcgctggaaacggcgaaacggctgcatgacgtgcggcaacactatgcgctggagcttagccagcacattaccgacagcatgcatacgctggcgatgccgcatggggtgttcaccatagatgttcgctttgaagagaatcacctgacggcggaaggcgcagatcgcgtagaattccgcgtcaccaccaacccgggccagcctttgcaggcgatttcgaaagtggcttccggcggtgaactgtcgcgtatcgccctggccattcaggtgattaccgcccgtaaaatggaaaccccggcgttgattttcgatgaagtggatgtgggtatcagcggcccgaccgcggccgttgtcggcaaactgctgcgtcagttaggtgaatcgacgcaggtcatgtgtgtgactcacctgccgcaggtcgccggttgtggtcatcaccactttatcgtcagcaaggaaaccgatggcgaaatgacggaaacgcacatgaagccgctggataaacgctcacgcttgcaggagctggcacgcctgctcggcggcagtgaagtcacccgcaatacgcttgcgaatgcgaaagaactgctggcggcataaactttttcgggatctcagggtcatacagaacaacaaaaacgccgccagaccggtttcaaagtggggcaaggtctattatcatcggcatattacatatgagccgcgtactgctcgggcccgaaaaggaatcaaatcactatgcgctgtaaaacgctgaccgctgccgcagcggttcttctgatgttgaccgcaggctgttccactctggagaaagtggtttaccgtcctgatatcaaccaggggaactaccttacccctaacgatgtgtccaaaatccgcgtgggtatgacacaacagcaggtagcttatgccctgggaaccccgatgatgtccgatccgttcggcacaaacacctggttctatgtattccgccagcagcctggtcatgaagatgtgacccagcaaaccctgacgctgaccttcagcagtgccggcgtgctgaccaacatcgacaacaagcctgccctgaccaaataatcaggcgtcagcaacgcaaaaaggtgctcattgagcaccttttttgtatctgaattcttacgcagaatcgtagtcccggtaagcgaagcgccaccgggggagaaagcgctacttacccgatttctccgctcgctgacggcgcagctctttcgggtcagcaatcagcgggcgataaatctcaacccgatcgccatccttcagcgtatcagcaagctttaccggacggctataaatgccgactttattcttcgccaggtcaatatcacggcgaagttcaaggatgccggaggcccggatagccgcctcaacggtggcgccctcttcaagcgtcacgcgctgcaaatactgcttctccggcagcgcatacaccacctcaacagcaatcttatgcgacactgtaaacctctttggcgcgcgtggtgaacgcctgaaccatattcgaggccagctctttaaagatacggccaaacgccagttcgatcagcttattggtaaattcaaaatccagatgaaactcaatgcggcaggcgtcagcgctcagcggcgtaaacttccacccccccatcagttttttaaacggaccatccaccagatgcatcaaaatactctgattgctcgtcagggtattgcgcgtggtgaacgttttgctgatccccgctttggagacatccacggccgcagtcatctgcgtcgggccggattccagcacccggctaccggtgcatcccggaataaattccggatacgactgaacgtcgttcactaactgatacatttgttccgcgctgtagggaacaagcgcggtacggctaatctgaggcatagcattttccatggtcacacaacagacaaataataacatttatcacctgttaaaaaaacgctaagccttatctcgtgctaagatagcgcgttagacctcacaggacgcaatgaggtgactttttaaaatcagattaccgacggctttacgacacttatgacgaagaaaaaagcacataaacctggttcggcgaccattgcgcttaacaagcgtgctcgccacgagtatttcatcgaagaagaattcgaggccggccttgcgttgcagggctgggaagtaaaatcgctgcgtgccgggaaagccaatatcggcgacagctacgtgatcctgaaagacggtgaggccttcctgttcggcgcgaactttacgccgctgaccgtcgcctcttcacattacgtctgcgatcctacccgcacccgtaagctgctgctgaacaagcgcgaactggaatccctctacggacgcatcaaccgcgaaggcttcaccgtggtggcgctctctttgtactggaaaaatgcctggtgcaaagtgaaaatcggcgtggcgaaaggtaagaaacagcacgacaaacgtactgacctgaaagcacgcgagtggcagctcgacaaagcacgtatcatgaaaaacgcaggacgttgattctgcgcacttattgtactattcaataagttagcgtttcgggctggtgtcgaggaagtaaaatctggtatactgagttcaacactattggggctgattctggattcgacgggatttgcgaaacccaaggtgcatgccgaggggcggtttgcctcgttaaaagccgcaaaaaaatagtcgcaaacgacgaaaactacgctttagcagcttaataacctgctaagagccctctctccctagcttccgctcttaagacggggatcaaagagaggtcaaacccaaaagagatcgcgtggaaaccctgcctggggttgaagcgttaaaactaatcaggctagttcgttagtggcgtgtttgtccgcagctggcgtgcgaatgtaaagacaaactaagcatgtagtaccgaggatgtagaaatttcggacgcgggttcaactcccgccagctccaccaaaattctccatcggtgaataccagagtcatccgatgaagtcctgaaagcccgcacggcgcaagccctgcgggcttttttgtgtctgtcgttgtccgagccattcgacttagtccggcgattatcgctatacgttcaggtattccggttcatgccggatcagccacagccccccagacctacaccaatgttctgcgtgctaaagcgcccgagaaaaatctaacgttgcgtcatggcccatgccatcgttgaaatccccgcactgcaaatcaaagcccaatctcccttcacgcaatcaacataaccaattgatattaaatagttatcacctcatatatttccgttttcttttgttttgtcgaacgatctgtgaacaacaccaaaacattaacaacaaggaaacaataatataaccacagaggtgaccttatgctcaataaagaacggcattatgcaattttgacctggcttaacaggtacgaacgggcgacggtgaatcagcttgcgaaagtatttaacgtcaccagggaaacgattcgcagcgacctaaacttattagcgcaggaaggcggcattgagcgatgccacggtggggcaattatcaaacgccgtatttttcatacccaatcagtcaataatttagatagcaatatcattcatttttttgactccgcgcagtcaagaaaaacgatcaaatcccgacataaagggcgaaagatgaaaggtaaagtctgtattctgggttcattcaacgttgatattattgctaatgtcgatcgtttcccgcaaagcggagaatctattttttccgaaaatacgattattggccccggcggcaaaggcgcaaatcaggcgctggccgtaagcaaatgcaatgttaaaacccattttgtcggtaaagtgggtaacgatcagtttagtcagatggcctttgaacatctttcatcttctgctatcgacagcttcacgctttatcaggataaagatcagaaaaccggcaccgcgcttatttatgtttgtcaaagtgatggtgaaaatatgattgccatcagccctggggccaataggtccattactgccgatgaagttgaagcgattaccccggaagtgaaaaacgcagatatttttttaacccagctggaaaataatctccccgctacctttcgggcaatagaaattgcccgccgtaacgggatcaaggtggtgttaaacccggcgccctggtcatctgatgtggttagctgcctgaagaacgtggactttctgaccccaaacgagactgaggcctcattgctgtccggcattcatattgtggatcttgccagcgcgaaggaagccgccagagccattaaagcgaaaggggtaggtcacgtcatcatcaccatgggagcgaaaggcgcgcttatttatgacggtgagcaattcattcatatcccggcgctgaaagccgtatgtgtggataccaccggtgctggcgatgccttcaacggcgcattcgccgccgcgatggcgaaaggggaatccattattcaggcagcaaatttgcctgtgctttcgcctctttggccgtcgaaaaagaaggcgcatcaaatatgcctgaatataaagatgtcctgacccgcctcgcgcaatataacgataaaaaaattctcaccgagaaaatttaacgcacgcatatttctgcaaacacagattatattcacgacaaccatttcagtaatgggagtatgtccgatgaaagccctgacagaatctaaacccggcggcgcgataccgcaggtaaataacatgcctcaccagcaaacactatcccgcatggcacgttgccgccagacgttacgccggtggtggccgttctacgtgatggccctgcctggagttatctatttttttatctggcactatttacccatttgggaaaccaaaattgcgtttgagcagtaccgtattatcccgccgaatatctgggtcgggatgcagtattttgccacgctgatgtcatcccctgttttctggcaggtgatacagaacaccgtgattatcggcgcaatgaagctgatttttatttttccggttcccattatcgtggcgctcttgctcaatgaagtgcgctcatccggttaccgtaaatttgtccagtcggtgatttatctgccgcattatctttcctgggtggtgatcgccagtatcgcgattgccacgctctcgccggttgatggcgcggttaacgacatcattaaatcgatgggctacgatccgatcccctttatgaccgacagcggctctatccgctgggtactggtgttcactgaaatgtggcgcagcgcgggctgggattcattactttacatcgcggcgatcctcgccatcgatccacagctgtatgaagcggcggaaatggatggtgccgggcgctggcgcaaaatctggcacatcaccctgcccgctatcaccccgaccatcgccacgctgtttatcctcaacgtcgggctgttcctgagccagggttttgatcaggtcttcaacatgaccaacgacgtggtgaacggtcagatagacatcatcgacacctacgtctaccgcatgggcctgcgcaccggggagttctcgctggcgaccgccgcagggttattcaaaggcgtgatcggcatggtccttatcgtgctggcacataacgtttcaaaacgcctgacgggtaaaggagtctggtaatgcgcatctcatcacgaagcaccccttttgagcgcatcgaatacgtgctcattctctcggtactgatgctgctggttgtcgtgacgctacaaccgatcctcaacctggtggcgatatccttctccagcccggcaaacgtgcccggcatgagcggcctggaaattattccgcagggcttttcgctggacgtctggaagctgctgctgaccaacgaagccgtgctgcgcgggtttggcaatgcgatgctgattaccgtggtgggcaccatcatcaacgtagttttcaccgtgctgctggcctggggctggcgcaaaaacgcctgccgggacgccgctggctgtttatgtttgtcctgttcaccatcgtctttgagccgggcatcatccccgattttctggtgatgaaaaagctggggctactgaacagctactggtccgtcatcctgtatcgcgcggtcttcgcctggtacctgattattctggttcgcctgttcgaagagatcccggaggagctgctggaagccgccgaactcgatggcgcgaacccgttccagacgctgtggtacgtcattatgccggtcgccaaatcgtccattgccatgatcacgttattttacatggtgctgcactggaacgagtttttccgcgccatggtgtacctcaacgacccggacaaatggccgttgcaggtggtgctgcgtcagtttgtcgtcgagggcgataagctggcgatggtaggcgtcgaaagcatgtcgaactacaccgatgccagccagatcagcatcaaggcgctgaaagccgggatgatcaccttaaccatcgccccgctgattgccatctacccgattattttgcgcttcttcaccaaagggaccatgtccggcgcggtgaagggttaacaggagcgatgacaatgaaattattcacagcattcgcctgcggcctgctgttatgccaggccgcctgggccgagccggtcactatccggattgtggaaaaagatctgctgaccaccaaccgcgaagatgtcgcgcatattcagcgaatcgagcaggcgctggcacgccagggacacgatatccacattgagatcgtcaacctgtcgtcttccggctactccgacgtgctgaacgtgatgctgctctccggcaccatccctgatctgatctatttcaacggcagcgaccagaagatggtcgaacagggcattcttgaagactggcgtccgtggattacgcaaacccgctatctgaaagaggcgctgtggccgcacaaccggcttcgcctgcaaaaccatccgaccctgctgtatgtctttcccctgcgcgcacgccagccggtgatccgtgaggactggttacagaagagcggattcagcgcatcacccaaaacgctggcggagtacgtcacgctgttcaatgcgatccacgccggtgactacaacggcgacggtaagacggatagctgggggatcacctccgagaaagacctgcgcgatctcgacggttttatgaacccggcgtttggcattcacgccacctggctcaagaacgatcagggcaagctgatcaacgcccagataagcccgcaggagcggagcaagctggagttctaccattcgctgtatcagaaaggattgctctcctcccagtacatcaccaccaactgggagctaaaagaggatgagttttataccggcaaggttggcgtggtatccgtctcatcgccgggcaacgtcggcgtgtaccaggaaaagatgcgccagatccatcctgacgccaccctcaccctgctcgacccacccgaaggcccggcaggtaaagggctggcggcgacagatgtttccatggaaacgcgcggctttgccatgtcctcgctctcgaaacataaaaaggaagtgatgatcctgctcgattttctggcaagcccggaagggcaaatgatggagcagatgggcttcgagaacacgcactacgttcgtaagggcaacacgataaacgtgacgccaaaaattaatgcctggtatccgcggtttatccaggccgccaactggaagccgccggtggagtggcggacgcctgcgatgctgcgctatatcgacaattcacaacgttattttacggcggataacgcctttatcttcccggcgtcgtttgccgccgccatcgactcaaccagcagtatttataaccagtgggcgtaccagtttgtctctggcaaagcgtcatttgatcagtgggatcagtatgtcagcgcctggaaagccgcaggtggaaacgccatgaccgaatatgcagaggaaaaattaaaatgaccgttactcaagtcgctgatttatcgttcacgtcccgcattctgggcatgctgtatggcgtggcgttcggtgatgccttaggcggaccggttgagaaactctccgcccggcaaatcgcggagaaatatggccgcgtcacctccatccaccagcgctggcaccggatggacgagccgtccgcacggcgcaacaaccgcgtacgcggcaacggtatcatcaccgacgatacgctgatgacgctctgcctgatggaggtttacagcgagctgggccgtcacgttgatgcgtgggatatgggggagtcttttgtgcggaagattgcctgggaaccgcgctgggtgccggaactggatcgggaagcgctggttattgagcgcctgttttatccggaaaaatggatcttccatcgtctgcaactggccgcctgcgatccgcgccagggcggcgtgggcaatatggtgaactgcggcgcagccatgtatgccgcnnnnnnnnnnnnnnnnnnnnnnnnnnnnnnnnnnnnnnnnnnnnnnnnnnnnnnnnnnnnnnnnnnnnnnnnnnnnnnnnnnnnnnnnnnnnnnnnnnnnnnnnnnnnnnnnnnnnnnnnnnnnnnnnnnnnnnnnnnnnnnnnnnnnnnnnnnnnnnnnnnnnnnnnnnnnnnnnnnnnnnnnnnnnnnnnnnnnnnnnnnnnnnnnnnnnnnnnnnnnnnnnnnnnnnnnnnnnnnnnnnnnnnnnnnnnnnnnnnnnnnnnnnnnnnnnnnnnnnnnnnnnnnnnnnnnnnnnnnnnnnnnnnnnnnnnnnnnnnnnnnnnnnnnnnnnnnnnnnnnnnnnnnnnnnnnnnnnnnnnnnnnnnnnnnnnnnnnatcggagctattaatgcctgcaaccctgaggcagcttaccaggaagccattaatttcacccaggggcatcagcagagctatgggctggaggccgccggggtcttcgccgcctgcgttgcagcggcatttattcctggcatcaccattgaggctatcaccaacatcgcattgaaactggctaaagacggcacccgccaggccatcgcggcaacgcttgaggtcgcgcgtcgctaccgtggaaccgcatgggattatcaacaggtcgttgacgccctgcacgatgcgcttttgcccttctcaccgatgggagatgacctgatgcacggcccggaaaaagcgggcgtcccgaccatggcctaccagccctcgcgcctgatgtcgattgaggaactgccaatggcgctggccttctgcctgctgcgcgaaggcgagtttcgcggggcggtggaagacgccatcaattcaggccgtgataccgactctatcggggtgatgagcggcgcgattttaggcgcgctgcacggggaagccattgtcgaacctgaggtgctggcgggtattgatagcgccaaccacctggatctgcgtacggccgcgctgcgcttcagcgaatcagcacaaagcattatccagcaggatctcgctgcggcggcgctttaccgccagcacgtcatgccattattgcagccaggccacaccgccgggcgaggagagtaacatgagccaaatcgttttaaataatctcggcaaatcctacggcaacgtcagcatcattaaagggatctcgctgagcattcacgaaggcgaatttattgtgctggtcggcccgtccgggtgtgggaaatccaccctgctgcgcatgattgcgggtctggaagacatcacctccggtgaactgctgatgcacggcgaggtggtcaacactctgcccgccaaaaaacgcgatatcgccatggtgttccagagctatgcgctctatccacacatgaaggtgcgggacaacatgagttttgccctgaagcttgccagcgtctcaaaagcggaacggatggcgcgcgtggaagaggcagcggaaatcctcggcctgacgcatctgctcgatcgcctcccgcgggatctttccggcggccagcgtcagcgcgtggcgatgggacgcgcgctggtgcgtgacccgaaggcctttttgtttgatgaaccgctctccaacctggacgccaaactgcgccataaaatgcgcggagaaattcgtaagatccaccagcggatgggtcgcaccaccatctacgtgacgcacgatcagacggaagcgatgaccatggcggacaggattgtggtgctgaatgccggacatattgagcaggtcggcaccccggaagagctgtaccgtaacccggataacctgtttgtcgcgggctttatcggcacgccggaaattaacacccttaaaggcgtgattcagcacggcgagattgtgctcaacaacggctaccgcttcccctgccccctccgctcacatattgaagggatggagatcatctgcgccacccgaccgcactatatccggctcggcgagtcagggatgccagcggaaatcgtgctgatagaaatgaccggggaaggacaggagatccgggtgcgtatcaacgatcaggagctgatcgtggtgtcccatgaaaagctggatatcaacgtgggtcagaaggtcttcctcaccgtagacgcggaaaaaatgttcttgtttgatgcccagaccggtaagcgcctgcggtcatagaatgcttaatcaatccctcctgcaatcgcagggggattttataatggcggtgggtatatatcaggctaggccaggctagtttccagcatcgaatccaccatatccatctcttcacggctgagcagcatttcgatattgaccaggatgatcattctgttttccatcacgccaagcccaagaagatagcggcttgatagcatggacgcgaagtccggcgtcggtttaatctgatccatgtccatcgacagcacgtcaaccacaccgtctaccacgattcctacaacgcgattattgaggttaaggatgatcactaccgtactgtcatcctgctgaacgtcaggaagactgaagcgcacgcgaaggtcaactattggcactatcacaccgcgcaggttggtcacgccggtgataaaacctggcgcgttcgggatacgagtaacgctatcgcatccacgtatctcttgtaccttcagaatgtcgatcccatattcttcgttaccgagacgaaaaaccagatactcctgcgcaatggcgtccgcgcccgcaggctttgtcgttgtttgggtcatgctgttactccttgcttgccgaacgtcggcctgacatggttttccttttgtccgttcatcgtcgacagttcaaccacgtcgaggattagcgcaacgctgccatcaccgagaatggtcgcggctgaaacgcccggtactttgcgatagttctgttcgaggttttttaccacaacctgttgctgaccaatgagctgatcgacccacagggcgtagcggcatccagcgctttggacgatcaccacaatgccatcttcaggtgcggtctcgccgggcaccgataggcgctgacgcagcatcaccagcggaagatattcgccacgaatttgcagcaggcgttcctccccgacgaagcggcagagcatatcctcgccgggcctcagcgattccattaccgcgccgagcggcagaacatagatctcctgtccaactttcaccagcatgccatcaaggattgccagcgtcagcggcagaataatgcgtatcgtcgtgccttctcccggctttgaaaggacttcgacatggccgcccatggccataatgttacgacggaccacgtccatacccacgccgcgcccggaaacatccgtcacgctttctgcggtggaaaatcccgcggcgaaaatcagcatccatacgtcctcatcgctgagggtgtcgctgatattcattccctgggagcgggctttcgcgaggattttctcccggttcagtccggcaccatcatcagtcacctcaatgatgatattgccgccatgatgttccgccgagaggataagattgcccactaccgacttccccttacgggcacgttcttctttctgctcaatgccgtgatcgagactgttacgcaccagatgagtcagtgggtcgataatgcgttcgatcaggctcttatccagctcggccgagccgccacgaagagttagctctacctctttgttcaggcgtgaacccagatcgtgcaccagccgcgggaagcggctaaacacataatccattggcatcattcgaatcgacatgactgatgactgaagctcgcgtgtattacgctccatttgcgccacgcagctggagagcatgtcgtagctcgctggatcaagttttttggaaagctgagatagcatcgcctgggtgatgatgagctcacccacctggttaatgatctgatcgactttactgaccgccacgcggatgctgcccgattcctgactattactgcgggctggcaccggcgcggcaggtcgtgaaggcggttctgaatggtccgcgactacagaagccttgtccgtaacaggagaagtcacttcaaccgacgctggttgaacgacatgctcgataaggatttgcgactcttcaagcacaaaacacagcaccgcggagatatcatcggcagaggcgctcgtgcgcagctgaaccaccatgccatcatcagccttctccgtagcgacaatctctcccatgtgggataactcttcctgaagcattgcccgctcgctttcaggaattttcttcaacgtcacgcagagtaaaggctcaccatcagctgccccctgctgcgtcacggctttgtcttgcaactcgactgccgtctgggcatgtttgtcttccagagcaatcttgcgcagggcttcacaaatatagcgataactcgcttcatcaggttcctgcgaagactgataagcttccagttgcgcttgcataatgtctttacattccagaaatagattaacggtcgttcggttaagcgagcgttctccggctcgcacctggtcaaacaggttctcaagtagatgcgtggtctcttgcagggcattaaagccaaaagtccctgccccgcctttcaaagaatgcgctgcgcgaaaaatggcatttacctgttcaggattcggcgatgcggcatcaatctccagcaaatgcttctccatctcggccagcagctcttccgcttcggtaaaaaagatctcggtgaaatcattcatgtccatcgctatacccccttacctcctgctgcgtagtgttgttcaggacgttttctgggcgatgcatgcgcgtgtcttccagacggatatcctgttctttggttttacttaataccaaaatgctaatacggcgattcgccggacttgagggatcactgttttctaaaggcatacggcttcccgtgccgatcacgcgaagaaaacgctcatcgtcaagacctgctttaaccagcacgcggcgcgcggcgttggcgcgtccggaagaaagttcccagttactgtatccggaggtgccgcccgcatagggaagcgagtcggtatggccggtgagactgattttattgggcaactcctgcaacagcggcacaagcgcctgcaaaatgccgttcatataggattccggcagctcgctgcctactctaaacatnnnnnnnnnnnnnnnnnnnnnnnnnnnnnnnnnnnnnnnnnnnnnnnnnnnnnnnnnnnnnnnnnnnnnnnnnnnnnnnnnnnnnnnnnnnnnnnnnnnnnnnnnnnnnnnnnnnnnnnnnnnnnnnnnnnnnnnnnnnnnnnnnnnnnnnnnnnnnnnnnnnnnnnnnnnnnnnnnnnnnnnnnnnnnnnnnnnnnnnnnnnnnnnnnnnnnnnnnnnnnnnnnnnnnnnnnnnnnnnnnnnnnnnnnnnnnnnnnnnnnnnnnnnnnnnnnnnnnnnnnnnnnnnnnnnnnnnnnnnnnnnnnnnnnnnnnnnnnnnnnnnnnnnnnnnnnnnnnnnnnnnnnnnnnnnnnnnnnnnnnnnnnnnnnnnnnnnnnnnnnnnnnnnnnnnnnnnnnnnagacgcagcattatgttggatttaaagttattgagccggggatcggtttcgatcatctgctgcaatttatctctggcctgtttcaggctctccatccagcgctgccgctcgctctgtacccgcttatgattcgccacttctccgtcctgcttcatcagatcgtcaccgccgccggggatgatgctgtcgctcaggctggttttgtcgccattggccatagatggcttaagcggcatgcggaagtaatcggcgatcatctcccgctgcaccgtgctggactgagaaatcagccacattaccaggaagaacgccatcatcgcggtcataaaatcggcgtaggcgattttccacgtaccaccgtgatgagcatgctttttcttctttcgcttgcgcgaaatgattatcggggaatcgtttttcatgccgtggcatccgcagacttagacttaaggctggcgctggatttcacttcccgcacatgctcttcaagctcctcaaaggaaggccgttcgctggtaaaaatggtttttcggccaaactccacggcaatttgtggcgcatagccgtttagactggagagcagcgtgacttttatacactgaaggattttgacctgatcggaactcatctgacgcagcagggttgcgagcggtaatacaaacccgtaggcaatcaaaattccgaggaacgtgcccgcgcgtggccaatcagcattccgagctcggctgcgggtcggtccgcggcaccgagcgcgttcactacccccatgacggcagccacaataccaaaggccggaaaggcatcgccgacggtattcagactgtgggccggaacctcaagctcctcttcgcaggtttcaatttcctcatccattaacgcttcgatttcatgcgagttcatacttccgccaatcatcaggcggaagtaatcgaggataaagttgcttaacatcggatcgctcatcagacggggataagcgctgaaaatttcgctgcccgccggatcttcaatgtctttctcaagtgacatgagtccctgaacacgactttttgacagcagcaaaaacataagcgccatcaggtccatataaaccgttttgttgtagcgtttccccacgaacagcttcacgatagctttacccgtcgccttaagggatttcatgttattaccaacaataaaagcgccgaccccggcaccgccgataattaacaattccaaaggctggaacagcgcgagcagattaccaccagacagtacgaacccaccaaatacggtagcaataacaacaagatagccaaagataactaacacactctctcctttttactcgctgaccgatgtcgagtgccgtggcatcgaataaaacgccatcctgtgcattgccatcgaacatccgtcaggctgtcataatttccggcgtggcataattgcctgcgattccgctgaggttgacctgcgatttcttaaatgcccgcgaaggagggctacacaaactacaggtgaacgggtttttgatgaattccgtcgtgaccacaaaaccaccggaacaaacgctacaggccttacgggaaataataccgcagtcgataaagcgtaataatgtccaggcacgcgttagccccaggacaggtttatcgtcgcagcaagaaccacactgctccagataaagacggtaggttttcatcaatatttcaataggacgcccgcccccagttttctgaagataaaggtaaatgttatagaacatggaagagtgaatattctgctcccatgacatgaaccagtcttcagaaaaagggagcatcccttttggaggcggacagccgcgtaactctttatacaagcgcagtaaacgccgacgacttaaagaagtttcagattccagaacctgcattcttgccccaaggttaattaaccccatggcaatatttacctcttcaatttcttgcaataaacttttctcgcacattttatgcctctcccgtcacagcagcatcggactcgcttaatgaattaagtaagtttgtcgataaaatgatgccggtatgaatttgctgaagagcttcaatacgcgaatctttcgtcaaattttcgatgaccacttcgtcatcgacgcgtaaacgacaaatcaactgattggtcgcagccagtttcatcaactgtggtaaagacaactcttttaaattatcaatcgtgccttcggataagccgagacgaaaactggcagcaaacttgtcctgtctgatcagctgctgcgccagtaataaataagaaagattaatatcgtgaatgttttgcagatactcgtcaaaattggacacaaaaagctcccactgtttttcaaccacaaacaaggctaaatagttaaggcaaaatgtttacccggtcgatgcagagagtcttttggcattgataatcgctgaattcagtcaagctgattcaataaattatcgaaaaacttttcaatgccaaaggatggctacatcacaaatctgacgaaatcatattcattaagaattttcctagcaagctttaagaaaacaacgcgcaccagaaaactatcataactaaatgatttacctataaaaatacacattgttaaacattcttaattatcacgcaacgtaattaactttacttaggaaatattgttaatcttgttaatgttatcgctatgttattctttccttaaccgatccattctgcttcgtaagcgttttatcgctaaactgtgcaactggctaacgcgcgtttcggtaacgcccaaaattaatccaatctctttcatgttcagatcctgctgataataaaactgcaatatctgctgttcacgcctggggatcattcggatatgctcagcaatgttggctatcaagttttcctgaatggcctcatttaacggattaagctgtgcattttcgccatcattactctcccaactgtctgaatagttttcctgaagctcatcaatagagtacatctggctgctattattatcagccagcatttgctgaaattcctttagcgaaacgcccatccgttcagcaatatcagcttcggtcgcttccccccccttttcctgttcgatctgctgaataagtgacacaatttcccgcgaatgcgatcgcacgcgccgtggaacccaatcactttcccgaagctcatccattaatgcccatttcacacgctgtgagatccaggcattaagggccaccccttttttagggtcaaagctatcaatggcactcaaaaaacccatggagcccgcctgaatgagatcgtctaattcgacattggcaggcagtctcttatgcaaacgcagcgcttcttgcctgacgataaaatggtattttgaccacaatgccgttttattctccagcccttcagctgtgtatataccgtccacgcatttcttccacctaatcttcacattctcaattatcagttgaaaccacataatcaaaaagtgcgataagcttttataaaaatgcgcattctgttaatttaatcatcgcgctgcctgacaggaataattggcgacactcttgacgccaattattctctttccgcagatgtcagaacgtttcccactgcgcattatcattttcaacgtgacgcaacgtcattttttccggcgcgggcgtatggcgtttttcagctttttcatctcgcagggtaaactgggcaacaagctgctcaagctcgtccgactgagattccagtttgcctgccgccatggccgcttcttccaccatcgccgcgttttgctgagtcaccagatccatctcgttcacggcctgcgaaatctgattgatacccgcactttgctcgtcagaggccgaactgatttcgcccataatctgcgtcacctcagcaaccgaagtcacgatgtcctgcatgacgccgctcgcctggcttacctggcgcgaacctgtatcaatattgttaacgctggtattaatcagctgattaatctctttcgctgcatcggcgctgcgcttggcgaggttacgcacttcttccgcaactaccgcaaagccacgcccctgctctcccgctcgagcggcttcaaccgctgcgttcaaggccagaatgttggtctgattggcgatactgtcgatgacgccgttaatatcagcaatctgacgggagctttcggtaatctgcgccatgatagcttccaggtttaccatcacctcaccgccattttgggcattcatgcttgccccttctgccagactgcgcgccgcatgtgcgttatccgcattctggcgtacggtggttttaatttgctccatgctggcagccgtctcctgaagggccgcagcctgttcttcggtacgggaggaaaggtcgctgttgccctgagcaatctcctgggcgttagaatggatattcactaccccttcacggataccggtaatggtgttggtcagggagacacgcatcttctcaagctccctgagcattttgccaatttcgttatcagcgccagtctctatggcatgactcagatcgcctgccgctacgcgctgaagcatctcaacggtagtttccatccggcgcaccagcgcaatacgcaaccagtagcgaacggctaacaatacgcaaatcgcgatggccatcatcaccacgctgacccaaatcatcatcttgtagctgctttcagctactgacacatattcgtacccccggtcagatgagatttctgaatacttctcaattttttgacgcagctcggtacgcagttccatatcaccgttcatcgagcccgggtatccttccggtcgctcaagatagccgagcttggtttggacggtgttataaaccaggtcaaatttggcgcgaagctcctcagcagcccttgtctctgccaggctgttgaatttcacctgcgcgaaagcatccatctccttgcgcgcctctttcagcaggttgtgggtgtgtttgatcatctctggcgacagtggtttatgcagcgacgtctgaagcatcatcccgttcgtattcgccaccaccgagttaatgttatatgcggcgttagtcatgtaggcgttgctgtcattaacgtccacaacgcgnnnnnnnnnnnnnnnnnnnnnnnnnnnnnnnnnnnnnnnnnnnnnnnnnnnnnnnnnnnnnnnnnnnnnnnnnnnnnnnnnnnnnnnnnnnnnnnnnnnnnnnnnnnnnnnnnnnnnnnnnnnnnnnnnnnnnnnnnnnnnnnnnnnnnnnnnnnnnnnnnnnnnnnnnnnnnnnnnnnnnnnnnnnnnnnnnnnnnnnnnnnnnnnnnnnnnnnnnnnnnnnnnnnnnnnnnnnnttataaacggaaaaagccgtaacgccaaacagcatgcaagagatcatgccgataatcaggctgattacggtatagatttttagtttatttaacataggtcctcataagccgcacataaatatacggctaaaactttcataaataagatggaaagataatgttatttattaaataaattcattttttgcattgactgaaataccatcatggatgcgttcagcgcaaattctgacattttagaatccataatgagcgaggtcatcgtgctatagtcagcgccaatggccgtctgaaccttggttatggtgtcgttgatcatgacgtcgccactcatatcaagcgcgtccagttgctgaaggttggtccccagttccgcctgcgccttacccagacgatcgatgccgccggaaaccgcttcgctggcggcgctcaacgcagcattcagcgcatcacggtcgatgggatcgcgagaaagttcttctaccgctttatcaagaacagagaatatatccccgaaaacatcgctgcccaggtgacccgtctgcatatccgtaccatcggcaacggtttgtcgacgagcggtatcaccgccgacatagttacccgcatcgtcaaacggcgccgtatcgcttttaaatccgccaaaaatatagcgcccgctcccgtcgcgattattcgcgagatccatcagattgccgcgaatacctttaatctctgcacccagcgcccgacgatcttcatcagagtagctttccgttttcgccgctacgattttttcggtgagggtggtggtcagcaaattgcccacaccgttcaggatattatcttcatgctcaagtgaactccgcaccgttgaacgtacgttgctgtaaagctcaagcttcgccagtgcgtcctgataatttaccgcatcggtagcggactttggatcatccgaggctcgcagcaacgattttccagcagagagttgaagataaatattattattatcactcacgcgctttgacatgctctcggcgctctgtttaaacatatacagcgtacttaatcgcatcggatagctccttatttaatcgaaagcagcgaatcaaacatggtggttgcggtctgtagaatttgcgcattggcctggtaatattgaataaacatctgcatattgacggtttcttcgttcatatccacacctgaaagcgcctgcttcgcatcatatttagtttgcaggtcgatctcagccgaggaaatgcccgattttaccgcccgcgcgttagaaccaatggtccccaccaggcttgaataagcctccgtcagcgtgctgccgccaatcagtttctcattctggatcttaagcatctcttccagattaagattatttcccaccccgcccccggaggcatccgctgcggcaaaatcctgtgcgctgttgatcgcgcggccaataccctccgcagccccagccataggattaaaggaaaaactgtccccggcgcttgcggtcacaccggagagatcaatctcaatgccgtcaaactcaagcgtggcggaaccggccggcacctgcttcaccaggcgtccgtcctcccccattacgttccagtttgttccatcaaagtcgatgctgtaattttcagattttacgttggtgtagtccgtcacgctgatagcgtcgagcgttcccccaccggcattgcctgcatttgccaccgccttcataggtggcagagagaaaagatcgccccccggcacacccgctggcgtctcacccaaacggtgctgctcgttcatgcggctcgccatcataaaggcgatctggtttagctcgtttttagcgatctcaagatcttcgctgcggaacttaaacaacccggccaggcggcctttggtaatgctcgcttcgttaactggcgtggtagtgccgttgctatcaacgtaagagacaacgattctgtcaggatcgctttcagacgctgtggcctgtagcttgctggcgttttcgccaaagacaagggggcgaccatcctgaagcgttacgtcgacgcggccagatacgctattctcggttacatctataccgatctgctcactcagtttttccagtaatgcatcacgttgatccagcaggtccgcaggcggcctaccgttctgcgcctgtacgcgttccagctgtttattcacttctgccagctggtcgctgatgctattaatttctttaacgctggtttcgatattggtgttggtgctcttttccagcgcggtgaggcgcttgccgctgtcattgaagcgctgggtcaatacgccgagtgagctgaatactgcggaacgggccgggccgtcatctggggttgcgctcagcgtcgccatcgacttgaacaggttattgatagagacagagacgttgtcggattcatcgcccaacatattatcaatgtcgctcaattgctccatgcggccgttaagcgaggcccagtttgagacggagccgcgtagctgcttgttggcaaaagcatcgtaagcgcgatcgacgccagttaccgtcgcaccgtagccataaaatccgtttcccgtggtcatgccaccgagctcaccaatcacaaggctgcggcggctataggtatcgctcatgccattggtcaggttgctgcctaccacactaagagcggattgcgctacgctaaggccacttttcgcgagactaaagaggttgttcataaggcacctggatattccgttatttccagcccgatattcgggcagggtcaaaattattgctctgctttattcatcggtgattgcgaatttatctaaaaacttttttaaaatattttcgcgaggtcgtttttataggcttctacaccctgcttaatatcaccttttactttctgaataatggcgatcagttttttcgcataggcaggatcggttgcgtatccccccgcctgaagcgctttggccgcctgctccggcgaacgggaatgcgcaacgcccgcatagcgcgggttcttagtgagtagcttcgtataatcggcgagcgcatgttcataggaatcgtaaacgcgaaacgaggcctttatcttttgcttcacgccgttgatgtattcggtggtcatcacctctgtggtcttgccttgccagtcacctccggccttaatgccgaacaggttatggctggggcggccgtcagcggtggggatttcacgctgcccccatcctgactccagcgccgcctgcgcgaggatcagttgcggatgaaccccgctctgcctggcagcgatctgtgctggacgcagcagacgagaaataaaggattgagccccctgcgctactttgccgaaggagaccgacgcagacggcgccagcggaccggtggcggatctgacggaggaggaaagtcccggcaaattaagcggaccgctgccgggcgtcgacaccgatgggctatcgatctccccgcctgactggcgcacaatcatatccgcaaacccaagctgtccgctcccggcaatattttgcgccacctgctggtcgtgcatcgcggtaaacatatcggtggactggctgtgcatgaggtcatctttgatggtggcatcgcgcatgctcttcatcatcatctgcacgaagatcccctccatctgctgcgccgccgccctgagcgccccgggttcagcgcggcgtgcatcgcgctttagcgcgtcgagagagcgaacgtcaaaggctggcttatccagacgatcgaaagcattcatcactccacctccagcttcgcacgcaggcagcctgcatttttcattgactgcaaaatggacatcagctcatttggcgtcgcgccaagcgtattgagtgccctgatcaccgcgttcagatccgtgctgctgcgcacgctttgcagcgagccgccgcggtcgcgtactgagatatcggtttgtggcaccacgacggtctgccctcccccgaggggagtatccggctggctcacaacattattctgtgtaacctctaccgtcagcgatccataagctacggcacaggcatcgagggaaacatggcggttcatcaccacggcgccggtacgagagttaacaatgaccttcgcatcctgtatctccacccgcagcggaatatcctggatattggcgaggaaacgcacccgggaaggaccatccggcggtgcaaacaaacgtacagtacgggcatcttcagggattgccgccccaccgctatagcgacgattaatctcgtcgctgatctgctgcgccagcgagaaatctgactcgttaagctgtaggcgcagcgtgttttgcgtggcgaagtcatttgggacttcgcgttcaaccgtcgccccaccgctaatgcgaccgccgttaagctggttaacctgcacgcgactgccgccagcctgcgcgccagccccggagatcagcacattgccctgcgccatcgcgtagatctggttgtccgcccctttaagtggcgtcatcagcagcgtaccgccacgcaggctcttcgcattccccagagaagagaccacgatgtcgatcttatcccctgagcgggcgaacggcggcagttcggccgtcaccatcaccgcggcaatatttttcagctgcatgttggtgcccgccggtacggtgatcccaagctgggacaacatattattgaggctctggcccgtaaacggcgcctgcatcgtctggtcgcccgtgccatcaagccctaccaccagcccgtagcccattagcgagttggagcgcaccccctgcaccgtggccagatcgcgaattcgctcggcctgcgccggcgtgtacagcatcggaatgctgagcagcaggccgagaaataacagaatggattttgtattcatcgtcgtatcaaaaaggagaaaggttcaggaacaggcgttgcagccagcccatcgtctgcgcttcgttgatgtagccgttgccgacatactcaatgcgcgcatccgccacctgagttgagggcacggtgttggccccgctgatggtgcgagggttcaccacacccgagaagcgtataaactcggtcccctggtttatggctatctgcttctcaccgaccacctgtaaattgccgttcggcaggagtttatttaccgtcaccgtgatggtgccggtaaaggtgttgcgcgccgccgccccgcccttgccggagaagtcgcttttgccctccgcgttaaagtcagctttgccgttacccagccagctgttcgagctgcccggcatggccagtaatcccattccggccgatccattacggttggcactggcggaggagctcttgctggcgctaacgttttcctgaagcaggatcgtcaacgtgtcgcccacgctgcgcggcctgcggtcttcaaacatcggctgatagccatagttcatggcctgtcctgcctggaacagcgagccgccggttgtgaccggtgccatcggtaatggttctgccgacgttggtccgtccacaagcggtttttgcaaaatatgcgcgcagccgcttagcagcagcacgcccgccagcagtgcaggacgcgatagccctgttggactgtatgtaaaaagtgttttcatttacgtgtcgataaaccatctatccgcccgagcctgcgcccggagcggtaagagagaggaaattaaagctgggtaagcctctgcaacatctgatcggatgcagaaacggccttactgttgatctcgtaggcgcgctggacctggatcatattgaccagctcctcagccacgttgacgttagacgtctcaatgtacttctgcttgagcgtacccgcatcttcaaggcccggattcagttcattcggtgcgccggaggattgcgtttcacgatagaggttgccgccaatgctttcgagaccggcatcgttgacaaaggtcgccagggtcaactgccccacctgctgcggctgagcctgacccgggagcgtcacgctgacgataccatcagggcttatctgcatctctttggcgtcctgcggtactacgacgcccggcagaatgggatggccttctgcgtttaccaactgaccgttttcatttttatcgaaatgtccgtcacgggtgtacgcggtgctgccgtcaggcaactgcacctggaagaagcctttgccttcgatagcgacatcggtatcgttgccggtcatgttcaggccgccctgagtatgcacgcgctgggtagagaccggacgcacgccggtacccagctggaggccgcttggcagcgttgtctgttcggaagcctgtgcaccgggctggcgcatggtttgataaagcaaatcctggaacaccgctcgctggcgcttaaagccgttggtattgacgttcgccaggttgtttgaaatcacgtccatattggtctgctgtgcttccagaccggtttttgcgatccataatgaccgaatcatctgtactccttgcgcgggttagcccacgcttaatagctggttggccttttgcgcgttttcatccgcggtgcggatcaccttcatgttcatctcgaagctgcgtgcggtggcgatcatctccgtcatggccttcaccgggctcacgttacttccctcaagggattcaggactcagacgcatggcgtcatcctggggcaacgcattgcccgccgccgggcgaaacagcccatcgtcgccgtggatcagggtgctcatgggagcattaaccattttcagtcttccgaccggcacgacggccgttggctcatcacccgcgccaagtgcagagacggtaccgtcctccgcaatggtgatctgtgaatggggaggaaccaccagcggtgcgccatcgcccatcagcggcttcccgccaacctgcaatgcgccgtcccgatcgatctcaatgccgccgttacgggtgtacccttcactaccgtctggcaaggctaccgccagccagccgttctgcggaagtgcaacgtcgagactgcgtccggtgtgggtaatcggtcccatggtgtcgtcgttatacggcgtcgattccgctaccagcgcgcgagttttcagggtctgcccctcaaccggcacagcgcgaaacgcggccagttgagcacgaaagcccgccgtggcgctgttagccatattgttcgacgtcacggcctggcggttgagcgccgcgttggcagcactcaatgcggtatatattgcgcgatccatccgccgcccttatcgcaggttaaccagcgtctggagtagctcagactgggttttgatggtttgcgaattcgactggtagttacgctggtagacaatcatattgaccatctcctgccccagatcgacgttagactgctcaagcatattcccgttaatcgtaccgaagctgccggagccggaagtaccaaggaaaggctggccggactgcggcgtttcgctccagacgttattaccttcagccgccagcccaccgctgttggcgaaatcagccagtacgatttgtgccacggtctgacgctgaccgttactgtaggtcgcgaccacttctccgctgtcgccaataacaaagctctgatatttacccggggcctgaccgtcgatggtgtcaactttcacgaggctatcggtggcccggcgggtcaagctggaaagatccatgtcgatactcagcggcgcggagccattaaacgcggccccgttaatggtcattttggtactggccatcgccgccgtgtccatattgccgttgctatcgaactttaaatccagggaggtcacatcaggcgtgccgggcgcggtttcatcgcgcgcgtaagctttccactcgcctgccgcggtctgcacgaagtagacctttacggtgtgtttattgcccagcgtgtcggtcgcctcaatctggctctggtagttgtaggttttcggatcgctataatcgaacgagtcggtgatgatggtggtgtcatctgacttcaggttacccgtaagggatccggcggtggacgccgcggggggcatgtcttccgtcggtatacgaatgggtcctaccggtgcgccaggggcgattgtcggcggcgtaccggtcgcctggtagccggtcaggtacaatccattggtgctgttgatgatattgccgttctgatcctgcttaaactggccgttacgtccgtaatagacggcgccaccttcgcttaccatgcggaaaaatccttttccctgtaagcccatatccagcgagctattgcccgccgtgaggccaccgtcgccgaagttctgggtcacgcccgcaacctgaaccccgagacccgtcgttccggcgaagatgtcggcgaaggccacggagcctgctttaaaacctgctgtctgggagttggcgatattgtttccaaccacgtccagcgctttggcggctgcattgaggccgctaagaccttgtgaaaagctcatattgaagttccagagagtaaattattcgctatttttggataacaaccacatcgcccatggtgatggggtcatgattgagcaggtgcagtaccgcgccgttggccgtcatcgtgacgccagacacctgctcctgaatcaggccggaaatttccgggttatcgccttccggatttttcgcctcaaaggagagcgtgtattccctgtcctgaggcggccccggctccggctggaagttttccagatcgtcgagggtgtaagtcttcacaccggatttcacgtccttcagctgcgccgtataggcattgccttcatcatccgtcagcgtgacggtgaccgtttctgcatcgcccgataacaggaaactaaagctgtctgatggcttctcctccccgtccagtggctgcgtggcgtcaccaaaggcgactttcggatcgccctcgatcagtaccccacggccaacccaggaggcggcgctcatactgcccaactgcgccataagcgcctgaacgttgccgacagatgcgttgagtttttccactcccgcggcggtattgaactgtgccagctgggaggtcagctggttgttatccatcgggttagtcgggtcctggttttgcatctgtgcaaccagcagcttcataaactgctcggagaggtcggctgcactgctgcccgtgccgtaggtgctggtattgccgctggtgtcgtttaccgttgaaactgtcatatcctgccttactgaccaagggttaaggttttctgcatcagggccctggcggagttcatcacctccacatttgcctgataactgcgtgaggcggaaatggtattgaccatctcattgaccacgttgacgttaggcatgcgtacatatccctgttcgtccgccagcggattaccgggctcatagaccaggcgatcgggcgctgtactttccactacgtcgctgactctgacgccgccgatgccctggccggcagaggtgtccgcttcaaacatgacctgacgggcgcggtaaggctgtccgtccggtccggcaacgctgtctgcgttcgccatattgctggcactcacgttgagacgttttgactgcgcggccatcgccgagcctgaaatatcaaatacgctaaataacgacatttatttacccctgactgactaccgtcatcattttcttaatatctgcaccgaggaatgtcaggctcgattgatatttcatggcgttatccgcgaaattaactcgctcgcggtccatatccacggtgttaccatcagcacttggttgatccggtacgcgatatagcaactgagcatcatcaaaaggcatttttttaccctgcatatgcttgctggacgttaaagccattgtgacaggccctgatgcaggtttattccctaacgcatttttaagttgctgagaaaaatcaatatctcgcgcctgatagcctggcgtatcggcattcgcaatattcgatgccaggacttcctgccgacgcgagagcagacctaacgcttgctgttggaagcgaaacgcatcgtcaagtttattcatcatgcactctggcctctgccttgctttatataaaccgcgatagtgtagacagcgctgatgaaatattacactgcaaagacctgacagaaataggcgctattagcgaaattaagatagatatttaaaacatgcggcactgattcatgaaaacggcagcagaagtgtcattatttaacgcaataaaagcgtttctatcacgtatataatttagtcagaataagcatacccgtttactttactggttttacaataaggcaacaagatgaagcttccattattacgcgtaacgctggtaacgctccttttcgcgagcccgctgtatgccagcgtgccatccgcgacaacggcgaaacttcgattagtgcagaaactggaggcgctggttaagctcacggaaaatccaggcaatatcgttcgtaccgttacgctgctggcctcgcccggacagctatcagcggtgtgcgaaaatcctgacctgagcctggccgggcatgatgaccgcctcaccggcaaacgcaccgcagtggcgcgctgcggcatgcgtaagttctatctgccgtttagcattagcgcccagggaaccttctgggtcgccagtcatagtctgaagggcggggaaattgtgcagcagggcgatattactcccatgaccggcagcatagacgatttgcccgttgggctaatgtttgaggcgagggacattgtcggccaacgccttttgcgccccctttccgcgggcaaaccggtgctgcaaaaccagctgcgccagcagtggcgtcttcgcgccgggcagacggtagaactggtcatgtcgggaccgggtttctttatccgcagccagggcaaagcgctaaacaacgctgcggttgacgatacgctgcgcgtgaaaaccacgggtggacgtaacgttacgggaaaagtgggtcgtgacggagccgtgacaatttttttagaacaataattttagttttttcgtgtatttccgaagactagtgtataggcaagagcagtaacgattactggcgaggataaacatgagcatcgaaagcacccaacccaccgcaccgattggcaatctggctggcggacaggaactgcgtacacgcggcactactcaggaaaatagtgtcgcgacgggcgaagcgcgcggaaacaaaaccgaagtgaccctgagcgcgctgacaaaaaaattcagaccgatgacagccgtgacgtggattatgcacgggtggataaaatccgtgccgcaatggcctccggggaactcactatcgagccagagaaaattgctcaggcgctggtgcgacatatttttgagtattaataacggcaggattttttaacattatggataagctgtacccgatactgacgcaaatgaaaacatccctggacgagctggaagccatcatgattgaagaggtcaatcagctcagccgcgtacaaataaatcccgtttcgctacaggtattatcggataataaaagccaattgctttcgtcgattcagtactatgatgaaatgcgtctccagcaggaacagctttccgcccttcaggcgccctatcaccatcacagcaggctgttcaccagctggaagctgatcagagaacgggtgcaaagcaccaaaacgctgaacgcgcaggtcgaaacgcttctgcaaaaccatatgaagaagaatcaatatatgcagaaggtggtagaccgcgtgggtcacgccaacacgctctacggccccgccggggaatccagccaggcacctgcgggtcgtaaatacaatatcagcatctgattcgcctcttgcttacccgtaaccgagctcgcccatggcgggctttttttacgcgctaacgtcatcttgcagagggattgaggcgggacacgctcccgccttcaggggcgggagcgtcagacagtgtggtatgcctgggcagacgcgtttgatttaagtagagcagaaatgttattgctgagatgacctagccggacagacatccgctggcgcagacgttcgtcctgggcaagaagctgcgcaagctgtgcgcgggcgtcttcagcaagcggcgagagattgaactcacagagcgcctgcataccccgggcgtaggctgcaacctcttcgttaaagtactcccacgcctcctcgtctgctaactgctgtagacgttcgttactctgcaacatcagggcgatttgccgcgtgagtttatcagccatgcttcacctgacgcgcctgtgggtcgatggctttccacgtctcggccatatccaccatcagtgagataagatgcgggagcatttccccggacttattaaggttcgcttccagcagagagcgcgaaatatactcgtacagtcgctccagatcggcggcaatctgtcccccaacctcatggttaagcccggcgcgcaggccattatcaataatgttgattgcacgggagatcatctcaccccggcgagcgatgtttccagactggaagtagatctcggcgcgacgcatggcattgattnnnnnnnnnnnnnnnnnnnnnnnnnnnnnnnnnnnnnnnnnnnnnnnnnnnnnnnnnnnnnnnnnnnnnnnnnnnnnnnnnnnnnnnnnnnnnnnnnnnnnnnnnnnnnnnnnnnnnnnnnnnnnnnnnnnnnnnnnnnnnnnnnnnnnnnnnnnnnnnnnnnnnnnnnnnnnnnnnnnnnnnnnnnnnnnnnnnnnnnnnnnnnnnnnnnnnnnnnnnnnnnnnnnnnnnnnnnnnnnnnnnnnnnnnnnnnnnnnnnnnnnnnnnnnnnnnnnnnnnnnnnnnnnnnnnnnnnnnnnnnnnnnnnnnnnnnnnnnnnnnnnnnnnnnnnnnnnnnnnnnnnnnnnnnnnnnnnnnnnnnnnnnnnnnnnnnntcgtagagcaaaacgatgagctggtgcggggtggcgccagcaatctggctgtccagagagacggaggaataggcgctgttgcccgttttggtgtacatcttcggttcctgccgggcagttggcctgcccggatgcgttaagttttaacccatgatcccaagcagcgcggactgaagctgctggctcgtactgttcatttgcgtcagggcctggtcgagacgctggaattccttacggctgcggtcaaggctgtcctgaatgcgttcctgcatgcgggctatctgtttttcaacgcgggtattttgttcctttacccccttgagagcggtggagatcgccccttcaaccttcgggatcgaatcgttatcgcccagataggtggtgaacacctcctccatgcgatccttgatcccgcccgttgagccggtgcctaaaaacagagcttccacttcctttggatttttcttcagcgcttcgtcgagctttttattgtcgatggtgagtatgcccagggtcccggtacgctcctcgccgggtttggtttcgttgaacttcacctcaataccgagcgcacccagagatttgtacagatcgtcggcatcgccatagctcccggcgacagcggacttcatctggctggtcaaacggcgcagggtaccgtcaccgaaaagcgcgccgtttgacgcattggcctgcggcagttcatcgccggtcgtcttttccggttcgttgtatgcactggcgctggatgccgcgctaagataggcgttatagacattcacaaactcttcaatcaggcttttaaccttagaggtatcggcggtgatcgacagtgtttctgatttcagttttgatgcgtcgtcaggatctttttctgagacctcgcgcagatcgagggtgatcccgtcaatggcgtcagaaatggtattggagctgcgttcaatcttcgtaccatcaacgtagacaatggcattctgcgccggcgtaatctcccgggcattatctgcccccggcgtgactgccgggtcgtaatccagcacttttgccagcttactgtcgccgcttacgctgatgctaatttcgccatcttcgccggtctttttcgacgtcacgaccagctgatatttgccatcttcggcaggcattaccgtcgcggtaacatcgccatttttagcattaatttttttagcaatctgtaccagagaggtttcatcatctttcagctccacctccatcggcttgcctttgcctgcggtgatggtcaccgtacgcggaccggcgccgtcacccagctgggtgtcgttcgcattttgcggtgccgtccccactttattggcttttgctaactgctcaacctggaccgagtaactattcgggatcgctcccttacctgccgttgcgttaaatgccttgttggtgccaatgctgaccccgttgaacccttcatcctccagttttttcagcgccgttttcaccgcatccagactgctggagattttaccccaggaggaagtttgtccttcataattgctctgcttctgcaaataggggtttaattttttattctcagctacctggagctgcgaaatcatactttcaatatctaacccggagccgccgaggcctgacatagagaacgaagccatgatttgtattcctgttacagtgaagatagatatagcgatatcatcggggtttcggccataaagtttaattttttacagttcaggcgacaacgaaaccaccacattaatacactcttacacgcttatcaggctattgactgaggtaatcgggagaattgccgtcacttgtgaatgcttttcctggaatataaaaaattatgaaaaaataatttagtcatttctttttcatccgattaattcagtatgcgcaacagacatcgcatatttaactggcgaatgccgtcgttactttatttaaaaggatattgatatggcccaggtcattaatactaacgcattgagcttgatggctcagaacaacctgaacaaatctcagacttctctgggtactgcaattcagcgtctctcttccggtctgcgtatcaacagtgcgaaagatgatgcagcaggtatggcgatctctaaccgcttcacctcttctatccgcggcctgacccaggcagcacgtaacgccaacgatggtatctccctggcgcagaccaccgagggcgcgctggaagaagtaaccgagaacttacagcgtatccgtgaactgaccgttcaggcaaaaaacggtactaactcctctgacgaccgtgactccattaaaaaagagatctctgcacgtctggacgaaatcaaacgtatttctgaaaccaccaacttcaacggcgttaacgttctcgatggctccaaagataaactgaccatccagattggcgacaaagatggccagaccatcgacatcgatctgaagaaactggacatcgactctctgggtctggacggcttcactgctgcattcgataaaattgccggctctgcgggcgccaccagccagtacaccaaggcagccactgcgaaagcagcgggcgacgatacgggtatcagcactgatgccggtaactggaaagttgacgcagctgacatcaccgcaattgaaacggcagtgggcgcagcagcaggcgacgtcgagctgtacgtagctgatggtgaagctttcgcttacgataaaactgccgacaaaatgtttaaactggacacctctgccatcaccttcaaggatgatggtgctggcaatgcgatcattgacggtgctgtacctgctggcgccgtaacggaagtcaacgcgctggatgccgatatcctgttgaacggtccatctacgctgagcgatgccaccaagctgaaagaaggcgcgaccttcaaagctcaggatggttctgaagtgacgctggatcaggctaaactggacgagatctccaacgcggcctttggcgctgacgctgctgacagcaacatgcagctgttctccgtgaaagacggtgcaaacaccaaatacttcgcgcagagcaccgacgcaagcggtaacactgtggtgaaagagctgaccttcgcagataacgcaactgcccctaccgttgcggatgcaggcgcagcgaactcagcgttcatcaacaccgccgctaacgctgccgcagccgacgacctgctgggtaacctggatgcagccctgaccgaagtgactaacttccaggctgacctgggtgcgattcagaaccgtttcagctctatcatcgcgaacctgaacaccactgttatcaacaccaccgaagcccgctctcgtatccaggatgctgacttctccgtggaagtgtccgcaatgagccgttctaacatcctgcaacaggccggcgtatccgttctgagccaggctaaccaggtacctcagaacgttctgagcctgctgcgctaatcccgaaaagcctcaacattttacgcgtatttattgcgcgttagccctccctgtcggagggcttttttcgttttgaacctcgctaatcgtcctcaatccttctcccctgccctgaccgtctgtcaggcaagtcacaaccaaccaaaaacattacaaataatatggttaaaaaggtctcgcaaaacaatataaaaacgcgtttaccctatttggagacaatcggtaatcgaccataaatagcatgcgtaaagtgccattgaatacgaaatgaaagaacgaacgcatctcgtttatttattatgaacgcaaccttccgctaaacagctcatctcaacattgtttaaatgatatgaccagtgagataaaattaaccaactcatttatagcgactgccgatatttaatgttaaaatcgttttcgctgcacagcgtgcaaaaggagaaattccctcctgttacttatacatttttaagcgtttagcttatctaacttgagcagtcagcaaatgcccgtcagtcattgcccttcacgtactaagcctcagaaaaataggattataagcgtcaccccactgctatcgtgccgccaggttcagcgagaggaatcaccgcatgcgcatcaaaatgggagggcatttactttatttatcacacaaatacgccaaccgaggcctggccatttttaacatcggcattaataacattaatatcgttgaaatttacctttagcgatccgcgaatagttgcgatataagccttaggtagcccgaaattgttgcgcattgttaacgaaaagactttacccaattaacataaatacccattcaattcaccttatctttcattacgaagtatcaagatattatggtcaattacattgcgattggatcgttagtgacgctggatttacacacgaggttactaacacgaacgcgcgacggcgagtgcgtgacgctgcctgccagcgcctgcctctgccttgccgccctggtggaagcgcagggacaaattttgtctcaggaacagttaatggatatcggctggcgtagcgctggcgttgaggtcacggataatagcgtgcgcgttatggtgaacaagcttcgacgagcgctggcctcgctagagatgcaggatgctattgcgctggttgccgtaacgcgaagcggctatcgcctgattattcgtgaagagagcccgccggaaccctcggctgaaagcgttgagatcctccccccaccacagccgcctgaaatgccggtggaggctacgccttctcccccctccgctacgccagcaccgcgtcgaaaaaggcttttgcgaagcgctgcgttcgcggtctgcggcatgctgatcggtattcttattgccttgtccgtcaaaaatgcgtttgtccccagcccgcagagcatcgagtttatcctctggcagggagaagggatcccccccggccatatcgtgatggtgcaaaaaaatcgaataagccaaacagaacttatccaggcaacgctgcacacctatagcgaatatgtgctggaaagacgcgtccattacagaccgggtaaaattttatacatcactaccggtacgggaaagatagataaatatcaggcagttattgcctgtcaaaaacccattcaggagcaaaagaatgactgtgaatcgttctattttcatctttattaaacgcccgcagatcctctttgctggcggtctgatgacaggtttagcgttaacaatcgggtacacgatcgccacgtcgccgctgagacagacgtgctttgccccagcctcgttttacactatcaaggacgaaaacaacgtgacgctggcgcgaggaatttatcgctcataccgcgatggacttcatgagggacacacgacctatatcggtaatatccgccattttcaggacggaaaacgcgtagggcaagcttcccccgtacagcgcagcgtgaattataccatgtccttctccggcaacctgctgcatctgacgatgcttagccacgcccgtcgactgggcgatcaaagcaacgaaaaagaggtgacggattatatttttccgcagcttaagagcggcgaaacctccaccagttccctctatttgctggaaaacagcatcctggcatcgggaacggagacggtagtacggatagcctgcacgaattaagccctcaaaccagcgcttgtagtaacccgctcaggatctcgaagccgtggctcatannnnnnnnnnnnnnnnnnnnnnnnnnnnnnnnnnnnnnnnnnnnnnnnnnnnnnnnnnnnnnnnnnnnnnnnnnnnnnnnnnnnnnnnnnnnnnnnnnnnnnnnnnnnnnnnnnnnnnnnnnnnnnnnnnnnnnnnnnnnnnnnnnnnnnnnnnnnnnnnnnnnnnnnnnnnnnnnnnnnnnnnnnnnnnnnnnnnnnnnnnnnnnnnnnnnnnnnnnnnnnnnnnnnnnnnnnnnnnnnnnnnnnnnnnnnnnnnnnnnnnnnnnnnnnnnnnnnnnnnnnnnnnnnnnnnnnnnnnnnnnnnnnnnnnnnnnnnnnnnnnnnnnnnnnnnnnnnnnnnnnnnnnnnnnnnnnnnnnnnnnnnnnnnnnnnnnnnnnnnnnnnnnnnnnnnnnnnnnnnnnnnnnnnnnnnnnnnnnnnnnnnnnnnnnnnnnnnnnnnnnnnnnnnnnnnnnnnnnnnnnnnnnnnnnnnnnnnnnnnnnnnnnnnnnnnnnnnnnnnnnnnnnnnnnnnnnnnnnnnnnnnnnnnnnnnnnnnnnnnnnnnnnnnnnnnnnnnnnnnnnnnnnnnnnnnnnnnnnnnnnnnnnnnnnnnnnnnnnnnnnnnnnnnnnnnnnnnnnnnnnnnnnnnnnnnnnnnnnnnnnnnnnnnnnnnnnnnnnnnnnnnnnnnnnnnnnnnnnnnnnnnnnnnnnnnnnnnnnnnnnnnnnnnnnnnnnnnnnnnnnnnnnnnnnnnnnnnnnnnnnnnnnnnnnnnnnnnnnnnnnnnnnnnnnnnnnnnnnnnnnnnnnnnnnnnnnnnnnnnnnnnnnnnnnnnnnnnnnnnnnnnnnnnnnnnnnnnnnnnnnnnnnnnnnnnnnnnnnnnnnnnnnnnnnnnnnnnnnnnnnnnnnnnnnnnnnnnnnnnnnnnnnnnnnnnnnnnnnnnnnnnnnnnnnnnnnnnnnnnnnnnnnnnnnnnnnnnnnnnnnnnnnnnnnnnnnnnnnnnnnnnnnnnnnnnnnnnnnnnnnnnnnnnnnnnnnnnnnnnnnnnnnnnnnnnnnnnnnnnnnnnnnnnnnnnnnnnnnnnnnnnnnnnnnnnnnnnnnnnnnnnnnnnnnnnnnnnnnnnnnnnnnnnnnnnnnnnnnnnnnnnnnnnnnnnnnnnnnncagcggccccgcaatcattagcccaaccttgatagcttccatgcccaataccatgacgctttcgggggtcatatcaggctcctatgagtaaaagctttgtgcaagcgaaccgaccagcagctgccagccatccacgagtacgaacagcatcagcttaaaaggcagcgcaattgtcgctggcggaaccatcatcatccccagcgccatcagaatgctggccaccaccaaatcaataatcaaaaacggaataaagatggtaaaaccaatctggaaggcggttttcagctcgctggtgacgaaggaaggcaccagaatactcaacggcacgtcctccgggccggtaagggtcggcgttttagcaatgcgggcaaacatcgccagatcggcttcacgcgtctgctcaagcataaaggcccgcagcggttttacgccttccttcagggccgtttccatggtgattttattggcctgcaacggctgccatgcctgttcatagatctggttgagcactggcgacatcacaaaaaaggtcaaaaacagagccagtcccactaatacctgatttggcggtgcggtcggcgtaccaagcgcgttgcgcatcaatcccagcacgataacgatacgcgtaaagccagtcatcatcagcagtaccgcagggatgaacgtgaatccactgagcaacaatagcgtctggatgggtagcgtccagccagcgctccccggcgagctggccagcgtaatgtcgccgttagcggcgagcgcagaggcgacgggcagcagcagaccaacacccgtcgcagcacgggcaatcaacagacggttcatttttgctcaccacccgaacggtatttatgaagaaagttatccagcatggcggggaaagccgctgaaggagtcgcctgctcaggcacctctggcctaacctgtacggtaagacagctaatgtgggttggggtaacacccagcaccagacgctgttcgcccacgtcaaccaccaccagccgttcgcgcgagccgagaggtttacttgccaccagcgataccgcagcctggctttcgcgggtgcaacgcgccaacccgctgcggcgagcgatccacgccagcagtaccatcagcataataatgagcatgagcgtaccgataaccgatagcgcgattgccccgccagagagcacgttcgtgctccctgcggcaaaaggaggttgtactgcgttcattagcggctcaggcgatgcattcgctcggatggggtaatgatatcggtaatacgaatcccgaatttatcggacacgaccaccacttcgccctgggcaataaggtaaccattgatcagaatatcaagcggctcacccgccagaccgtcaagcgaaaccaccgagccctggcttaagcgcagcagctccttgatagtcatttttgtgcggcccagctcaacggtcattttgacagggatatccagaatcaggttcatctcttcagaaaactgaggaaccgccgtttgctctgtacttcccgcagcgttctgctcgttcagcgcctcaccccaaagattgtccatagacttatcttcagatcccgacgagttattcatgtcgctcatggggaaatcactccttattgaaagattttaatgctggctgattcatccgatcgaccttcagagcatattgattatttacagagccatatttcgcggtaaataccggcacgctgccgacgttcgcttctataaactcctgcttatccagtgggataatgtcgccttttttcatcttcatgacgtttgacaaccgcgtgttgatgtcggcaaattgcgccaccagctccagctcggtttcacgcatctggcttgccagcatgctgcgccactcagaatcctcatggcgcgaattatccattggcggattgcttaacagttcacgcagaggctctatcgtgctgaagggaatacaaatattgaactccccgcgatgcgagccgatttccactgagaaaggcgtggtgacaacaacatcgtttggtgaagaggtaatattggtaaatttcacctgtatctctgaacggatgtattccgtcttaattttataaatagagccccaggcaaactcatacgcctcgcgtgccattgtcagcatacggtggatcacccgctgctcggttggggtaaattcccgcccgtctgccttcgtcgggaaacgcccgtctccgccgaacaggttatccacggccataaataccagaccggaggagaatgccatcagcgcggtcccacgcaggggattaaggtgcagcaggttcaggttagttggcaccggtaaattgcgggcaaactcatgatacggctggatcttgatatttcccgccgtaatatctgaactgcggcgcagcaggttaaatagccccatcctgaactgacgggcaaagcgttcgttaataatttccagagaatgaagccgctcgcgaatcacgcgtcgctgagtatttggatcgtaaggttttatccccgcatctcccatgcttccatggaggtcatcaggactctccgtatcagcattgagcaggcgatcgatctcatcctgtgataaaaaactatcagccattgtgtttaccgcagaataaattcattaatcaaaacgtcagtgacgttaatctttttgttgaacgccagcggttttttaagctcattattgatgttgctaatcagctggcgtttaccttcatccgttgagagcgtttcatacgtttgctgagaaagcagcataaacaatcggctgcgatattccggcaggaatttctcaagcacctgtacggacgacgtatcgccaagtcgtacggacagaccaatgtagagcacgcgatccgactcgtgctgcgtcggggtcaggctaacggtaaaggtattcatcgacacgtataacggttcaacttgctgtaccgccggggcttcgtgctcacttctcgaattgttgtccgtctgcacgtgtgcatatttcatcgaccagaacagatagcctgaaaaaccgcaggctgcgagggcaatcagaaacattagtattaacagaagcgagcgcgaccctccgcgagccgcagcatttttatttttgttacccattacgtaaacccaataaaataagagaggcagcaacctgcccctcgataaatacggcggacattgtagtccatttaatcagcagaataatcaggagataaaatttcattcctgtcggcaattcagcaattcaggcaaaagtgttaatgccgtatatatttccttgcgtcgatgttaataattccgccacagcatcttcgtccacgaacacgttatctgcaccttgagcggtatgctgctctccggaaggatgacgtccctgctcgccaccgccagtatgtggtcgatcggggctcacactcgcctggcccaactgaagcccggtttccgctaaagccgcccgcaggtgcggtagagcagtctccatcatctgccgcacctgggcatgttcgctgacgatatggatctgcgcctggtcctgctgcacgcgcaaagagatatgcaatgagcccagctcctgaggatgcaggcggatctccgcattgtgcaaattgtcgcggctgaacagggcaatatgttggctcaccgactgtttccattcgggcgactccagcggataacggacgttgaccacctgctgtgagacaggctgactgaccagtcgcgccgttgatggctccatcacgacgctctgaaccgtgggatcgcacgtagcgtgctgcgatgcgtctccctgatgagccgttaagcctggcatcacggcgctggcgtccggggctttcccccctaacgcctgtgcctgcatctggagaggggtatcttcgcgtcgggcgggcttcagcttaatatcgtcaacagggatcgttaaaggcgccttttcgccagctacctcttcacgtggcagagtcgcatcagcaagggtcgaagcctctgtagcgcccctcgcctggcgggtgactatctgctgaagctgccattgcgggctttcatcaccgggagaggcgctgattctgacctccgccagcgtgtcgtcactctcccccggctcagctaccggcggcaaaaccggctgcgggagagggtatccttcatgactcaacagctgcgccggaacgtccagcccaggtaacaacagtcccatctgcgccaacctgtcgtcgagcgtgagagcaaaatcctcgccgatgagttttcctttgcctgctctcgtcggcgctccgccggacagcagagccgtaatatcaatattcatagcctttctcttttctgtccggcacgctgggcgaattcgtccatcattttttgctcctggcggctctgtgccatagccagtgccgcttcgcggcgatcgatgagcgtctcaaacgcattaaggcgctgctttttctgtagccacttctctttgacccgatccacggcttgttcgcaggtggaaacatgtgattcgtgctgcttcaccacctggttaagtgacaaaatgaaagactgttgattaaccagatccgccatcgacataccgctgcccagcaggccctgacgcaaagattgctgatactcgcgctcatagtgctgaagctgttcatgctgggccacggctgccataagcgtctgctggacgctgccgagggcgcgagtggtctccgtaagcttttcctgagccatgtcacgcagcatgaccattggattattcactttcacgttttatcccgcctgttcaacgatgtctgggaaaagttggctcagtgcggcaatagcctcgtcgtaaccgctccgctcgtgtattgcctgatgcaggaaggcttccagcgcaggatactggtctatcgctctgtcgagcagcggatcgctgcccttcacgtaagcgcctacgctgaccagatcccggttacgctggtaggtcgacaacagctgcttaaaacgctgaaccttgcggtactggacatgcggaattagctccgtcatcgcgcggctaatagaggcttcaatatcaatagcaggataatggcccgcctcagccaggcgacgagaaagcacgatatggccatcgaggatcgcgcgcgccgaatcggcgatcggatcctgctgatcgtccccttcggtcagaaccgtataaaaggcggttatcgatccgccgccgcgcataccgttacccgcacgctctaccagtgcgggcagacgcgcgaagacggacggtggataacctttcgttgccggcggttcaccgatagccagcgccacttcacgctgcgccatggcatagcgcgtaagagagtccattatcagcaggacattcatcccacgatcgcggtaatcctcagcaattcgggtggcgtaaaccgcaccctgcatacgcaggatcggtgagacgtcagcaggtgcggcgatcacgaccgcgcgtgagagcccctcttcgccaagaatgttctcgataaaatcttttacttcacgtccgcgctcgccaatcagcccgacgacgatgacgtcggcggtggtgaaacgggccatcatgccgagcagcaccgacttacccacacccgagccggcaaaaaggcccatacgctgtcccctgccaaccgtcagcaggccatttattgccctcacgcccacatcgagcacggacttgatgggatcgcggtgaagcgggttaaacgagggggtaaacaggccggctacgggttttcccgccggtggacgaccatccannnnnnnnnnnnnnnnnnnnnnnnnnnnnnnnnnnnnnnnnnnnnnnnnnnnnnnnnnnnnnnnnnnnnnnnnnnnnnnnnnnnnnnnnnnnnnnnnnnnnnnnnnnnnnnnnnnnnnnnnnnnnnnnnnnnnnnnnnnnnnnnnnnnnnnnnnnnnnnnnnnnnnnnnnnnnnnnnnnnnnnnnnnnnnnnnnnnnnnnnnnnnnnnnnnnnnnnnnnnnnnnnnnnnnnnnnnnnnnnnnnnnnnnnnnnnnnnnnnnnnnnnnnnnnnnnnnnnnnnnnnnnnnnnnnnnnnnnnnnnnnnnnnnnnnnnnnnnnncacactcgaccggtaaaatagcctgcccggtctgacgttcaacaatgcacaacgcgcctatcggcagcttcaggccaacggcctccatcaccagcccggtagcacgcgtcagcttgccgtactgacgaaagcgcgggagctctccgagcttctcttccacccgatccatgaccgagagccagttttttaactgctggctcattgggacaattcctctcgggcgagctgacagagagactgccagcgcgtttccatggtggcgtcatactccacgtccggcgtgaccacacgacatccccctgcggccaattggggatcgctttgtaaggaccaccccattgaggagagcgtctcaccgatcgcctgggtgaccatgggcagatcctgcgggttcacatgcagttctgtcgggccgttgagcagggtatcctgcttcattaactggcggatctgcgcaagcagagcatggttatccgccacgctcagggtgccgtacagctgctgtaccgccgtcagcgccagctgaaccagacgtccgggaataaggctatcgagattcgaaagcgcaagcttgcactgcgtcacccattctccagcctggagcagtaaagcctgccgttcgtcacgggcctgttccagcccctgcgccagacccgcctcacgcccctccttcagcccggcctcatagccttcgcgacggccttcctcttttccttgcgccaatccctgagcaataccctgctgctcagcctgcttacgcaggcgtgccagctcggccttaaactgcgcgtcagaatggccggtatcctgcgtctgcaacggtacttcaaccgtttcgtttaacagatcctcaggctgccagctgcgccactgagcggcgctattggcatcaaacgtaggcatcgtcgctgcctccaatgatgatttcccctgtctccgcaaggcgacgaacgatgttcagaatagtcttctgctcggcttccacctgtgacaaacgtaccgggccgcgcgatgccagatcttcggtcatcagatccgactgacggcgcgacatgttacggaagaacttggcccgcagcgcttcgtctgctcctttgagggcgatgataagggtttcactttccacctcctgcaacagacgctggatgctgcgatcctcgacatccaccaggttttcgaacaagaacatttcgtcgataattttctgtgccagctcactgtcgaaatcgcgaaccgcctcaatggcggcctcttcctgctgggatttcatcaggtttaaaatctccgcagccgggcgcaccccacccattttgctgcgcttaagattctgaccgtggagcaggccgttgagtacctccgtcagttcctgcaacgcggcgggctgaaccccgccgaaggtggcgatacgcagcataatgtcgttacgttcacgatcgtcgaatttgctcaggacgtccgccgcctggttacgctttaagtggaccaggatcgtggcgataatttgcgggtgttcttcacgaatcagatcgaataccgccagcggatccataaagttgagcgtttcgatcccgtttccaccctggtgggtatccagcaaatcctcaagcagcgttgacgcacgctcttcacccagcgccttgaccagcacgctgcgcagatactcgttcgtgttaaggctcagcgcggcatactcgcttgagtcatttttaaagtcgcgcagcacggaggccatttgatcgtgggtaaaccccgccatgttgaccatagaactgctgatggtcttcacctcatgcgcgtttaggtgcttaaagacttcggcggccaggacgtcgcccagcgtcaacataacgatggcgcttttctctgcggcattcatgatttgagctcctgattcatccactgacgaataaccagcgcaataacccgcggctcttgttccgccagttcgcgcagctgctgactgttaagttccgtatccacacgctgctgagcgcggtcacgcgcatccttttcggacgctttcttgcgggcggccagctcttcctgacgcgcctctttttccatttccatgcggcgcaggctggtttcctgatggcggatccaggccggatgaacaagcttacgccacataacccaggcgataatcgcaataaccagataacgcgcaatcgccatcatcaactgataaaacttatcctgtttccagaatggcgggagttcctcttcctcaaccccgttgaacggcgagttcaaaatattgacgctatcgccgcgtgaggccgtatagccgacagcctctttaaccagagcattaatacggttcagttcagcctcactcagcggacccggcttgccctcagcgccttgcggcagatggtttatcaccaccgcgactgaaagacgatcgatgcgccccatggcatttttaatgtgggttagcgtgcgatcgacctcaaaattggtggtctcatcgttgtgattgttgtagggctgtgagcggtcatttccggtaccagcggtactggtttgagcggcaggcttgtcaagcggctgcgtaagtggcgcagtggcaggcgctggcggctgattcgtcagcgcgcccggtacgccgccattgccgcgtccgttaccctgctcggactggctcgtctggcggcttcgaatcaccattttttgcggatcggcgttgggctgatactgctcctgcgtctgctcctgctgggtaaaatcaatctgcgccgtgacctgggcgcgaatatttttgctgcccaccagcggcgccaggattcgctggatgcgctgctggtaatcactttcgatctcactggtgtacttcagctgtgacgtttgcaggccgcgcaaaccactttgggtgagcagctcaccccgctgatcgacgatagtgacattttctgccgtcagccccgtcacggcgctggaaatcagatgggtaatggcaatgacctgtccttcatccagggtacgcccctgaatcaggttgacggtaacggaagccgtcggctgtttttgctcacgcacaaacatcgtctgcttgggtgtggcaagatgaacgcgcgccgatctgatcggccccaggttttcgatggtacgcgccagctctccctcaagcgcccgctgataattaacctgttcgctaaactggctaataccaaacttttccttatccagcagttcaaaccctacggagccgccttttggcaacccctgttgggccagcttcatacgcacttcatggacctgcccttcaggaaccagaatagcgccacccggcgcgtcgatgcggtaagggacattcatctgcgacagctgggcaacaatggccccaccgtcttcatcactgatattgctaaacaacacgcgatagcctggctcttttgcccagaacataagcgcaattaataccgatacggcagccgcggcgcaaatgaccagcgatagcttcgggctggcgcgaagccatgacagagccgatttaattcggtcagccggattattcgttaaatcatttaatgtggcactcatgccgtgatcctgtaagaaatagcacgcacaataatgcgcgtcagcgcctgtgatatcgcagggctgataacgacgatttcaaattaagagaaattttcaggcgggcattatcgtctgaaaggccgattttttaaggataaataagcttaaagtaatgttcgcttattggattttatggccattttgcctacgtgttaaactatcaacgtttaaaagatatgtaataaatgtgtgcttttcccttattaattcaggaagtcaacaatgtcagcaactttaatgcgtggcgtactcgatcaaattaacactcagtcacagcaaatagccggcatgagccgaaaccagcctaccgcgctgaaaaacacgccgtcgttctctgacattttattcaatagtatcaatgaaattaatgaaactcaggttaacgcgaaagaaatgacgcagcagtggatgtctggcagtagcgatattggattaaatgacgtaatgctggcaatgcagaagtcctcaatttcttttagcttcggtgtgcaagcgcgcaataaaatgctcagtgcctaccaggaaatcatgaataccccggtataaggcctcgccctgtctatgagtgaatttaaagacattcccgtgcgcttatcgccaaataagcttacgttatccgattctgaattacagcgtattgggcaactgatctatcgccgcgccgggattgtagtcaacgcacaaaaacgagagatgatttttaatcgtttatcacggcggctacgggcgctggggattgacacatttcttgagtacatcagcattctggaatcccacagcgagcatccggaatggcagaactttgtcaacgcgctgacaaccaatctgacctctttctttcgcgaaacctaccacttcccggtgctcgcagaacacgcccgtcagcggcccaacggctaccgcgtctggtgtaccgccgcttccaccggggaagaaccttgctccatcgccatgacgctggacgagactctggggagcgcgacgggagggccacgcgtctgggcctctgacatcgataccgaggtgctggccaaagcggaggcaggggtataccgcatgtccgacctacactcgctgaccctggtgcaaaaacgccactattttttgcgcggctcgggtgagaacagcgatcgggtgaaggtaaagccagaactgctggccgctattcactatcagcggctcaacttgctggacaacagctggccgctgcccggaccgtttgacgccatcttttgccgcaacgtgatgatctatttcgatgcgccgacgcagaagcgtctgcttgagcgctttgcccgcatgctgaagccagacggcctgctgtttgttggtcactctgaacattttaatcatccgcacattccactcaggcttcgcggccagtcggtgtatgaacttacggaggccttacggtgaaacggatacgggtgctgacagttgatgattctgcgctcatgcgcaacatcctgagcgcagtgatcaatcaacagccagatatggagatggtcggcaccgcgccagacccgctgatcgcacgcgagatgattaagcagttgaaccccgacgtgctgacgctggatatcgacatgccgaaaatggatgggctggagtttctctcccgtttgatgcgccttcgtccaatgccggtggtgatgatctcctcgatgaccacccgaggctcgaaggcgacaatggccgcgctggaacacggcgccgtcgattttctggccaaacccgatcagcgtatcgccggaaatctggaactgtggggtgtgcaggtcgcagagaagatccgcattgccgcgaaggcaaaactgggacgtcaggctgaagtggcctcgccgatactgcggggcattaccgtggatccacaaagcattgtggcgattggctcctcgaccggcgggacggaggcgctgcgccaggtattaacgccgctgccagccagtgtccccggtatcgtcatcgcccagcatatgcctgctggatttacccgctccttcgcccagcgtcttgattcactttgccagataaaggtgcatgaagcggatgacggcgaaccggtacttccgggtacggcattgatcgcccccggcgacaagcatatggagatcgtccgtcacggaaaagggtacgccgtcaggctgaccgacgcgccccccgtcaaccgtcatcgcccgtctgtagacgttctctttaactccgttgcacagctggtgggcgcacatgccagcgccgccatccttaccggaatgggagccgacggcgcacgtgggttgctggcgttgcgggagtcgggcgcgtttaccctcgctcagagcgaagcgagctgcgtggtgttcggtatgcctcgcgaagcgattgcccttggcgctgcccgagaaatcgtcgatctcaataaaattagccagcgtctgctggaaagtttcagccataaaccacgacgttcaggagagaacacacatgtcggataaaaacctgcgttttttggtggtggacgattttgccaccatgagacgtatcgtacgtaacctgcttcaggatctgggctattcaaatattgaagaggcggaagatggccaggacgcgctgaacaagctgcgcgccggtgagtttgatttcgttgtgagcgactggaatatgcccaaccttgatggccttgagctgctgaaaaccattcgcctcgacccggcgatgtcaaagctgccggtactgatggttactgcggaagcaaagcgcgaaaacattatcgccgccgcgcaggcgggtgccaacggttacatcgttaaaccgtttactgccgccacgctggaagaaaagcttggcaaaatttttgaaaaactcgggtgaatactatgaccactcagcctggcgagatcgcggaaccgccaaaggatctctttttgcgtatcggtcaattaacccggctgctgcgcgacagtatggcaaatcttggcctggagcaggccattaaagaagtcgcggacgcgttccccaacacgcgtgaccgtctcaactacgttgttggcaaaacgtctcaggccgccgatcgcgcgctgacggccgtcgaggtggcacgaccgctccaggaaagattaggtgaaaatgccggtaagcttactgaacggtgggacgcctggtttgaagagccacagccgcttgacgaggcgcgagaactggtgaaagagacacgtacctttctgctggacgtgccggccaccgctcagcaaaccaaccaacagctcaccgaaataatgatggcgcaagacttccaggatctcaccggccaggtgctgcaaagcctgatgcaggtgattcagaccgtcgaaaccgagctaatcagcgtgctggttgaaaacatgcgcgaacgtgacgcgggtatcgaacagagcggtgacgcccatctcaagaacggcccgcagattgataccagcgtcgccgggattgtcgcctctcaggaacaggtggatgacctgctggagtcgctgggcttttgatgaccccaggccaacactatgtctgaagagagcgagagcgacaaaacagaagaccccacaccccaccgaaaacagaaagcgcgggaggaaggtcaggttccgcgttcgcgcgagctgaccacccttgccatgcttctggtgggctgggggcttatcgtcggcgcaggtagccatctggcgacgcagcttgaatctattctgcacaacgggctgacctttgatcgactgctgatccgcgacccgcagaatatgttacatcgtgcagcctcgctgttgagcatggcttttctcgccattctgcccttcgccggcgggctgtacgtgaccgcaataacggcaccgtcgattatcggcggcctgaacgcaagcagtaaggcgctaaaggttaatcttaaaaaacttaatcccgtcaccggtatcaagcgtcttttctctgcccaaatggtatcagagatgatcaaaagcatcctcaaggtgctgttggccgccacggggggaggactgtttttactgctcaataaaagcaggttcatcaatctaatgtatgaaccgttgggcggcgcgctaaacgacatcagcaacctgctaattggctgcatgctgtacgtgattttgtcactgatccccatggtggccttcgacgtgatttatcagctctggagcaactttaagaagctgagaatgagccgccaggagataaaggatgaatttaaaaaccaggaaggtgacccgcacattaagggtcgcgtcaggcagattcagcgccagatggcacaaagccgcatgatggccgaggtgcccaccgccgatgtggtcgtcaacaacccgacccactattccgtggcgctgaagtatcaggaaggcaccatgggcgcaccgatcgtcgtcgcaagcggcagtggacttattgccctgcgcatccgcgagatggctgaagaaaatcgggttccgatgctggaagcgccaccgctggcgcgtgcgctttaccggcactgcgagccgggtcagccggtgcccggtgaattatataacgctgttgccgaagtcctggcctgggtatatagcctgcgccggtggcgtaaaggctttggcttgcgcccaacagaacctaaagatttgccggttcccccggcgctcgattttgcacaagagagtaaagagtaatggctaatatcgccaccaaattacgtttgcccggcatcaaggagacccagtggcaggtactggccggtccagtcctgatcatgacgatccttgcgatgatgatcctgccgctgccaaccttcgtgttggacttgctgtttacctttaatattgtactggcgatcatgatcctcctggtcgccatgtttacccagaatacgctggagttttccgccttcccgacggtactgctcttctcaacgctgcttcgcctggcgctaaacgtcgcctcaacgcgcgttatcctgatgcacggccataacggcgctgacgccgcgggccaggtcatcgaggcgttcggccacttcctggtaggcggcaactttgccatcggcattgtcgtttttatcatattgataattataaactttatggtcatcaccaagggggccgggcgtattgcagaagtgggcgctcgctttacccttgacggtatgcccggtaaacaaatggcaatcgatgccgacctgaacgccggtctgatcggcgaggaggaggccaaacgccgtcgaaaagaggtgactcaggaggcagatttttacggctccatggacggtgcgagcaaatttgtgcgtggcgatgccatcgcaggcctgctgatcatggcaataaacattatcggtggcctgattatcggcgtaatgcagcatgatatgaccctcagcgcagcgggagaagcctacacgctgttgaccatcggtgatggcctggttgcgcagatccctggtcttgtgatctccaccgcggcaggtgtcgttgtaacgcgtgtggtcaacgagcaggacgtaggcgagcagatggtcggccagctgtttacctcgcctcgcgtgcttgccctctctgcggccgtaattggtttgctggggctaatcccaggcatgcccaatctggtctttttactctttacctcctcacttttaggcattgcatggtggctgcggggccaggaaggtaaggcgaaaaaaacgggcgccgccccctccgcccctacccgagctgaagctgacgtggcgcaggttaatgaagcgacatggtctgacgtacagatggaagatgtactggggctggaggttggctatcgactgatccctatggtcgatcatgaacagcagggccagctgttaacccgcgtacggggtattcgtaagaagttcgcgcagcagatgggctttctgccgccagcagttcatattcgcgataatctcgacctgccgccgactcactatcgtattctgctaaaaggggtgacgattggtaaaggcgaggtccagcccgatcgctggatggcgatcgatccaggctgtgcagagggagaagtgcccggtacgccctgtaaagaaccaacctttggacttcccgctctatggatcgatgaagtccatcgcgagctggcgcagacgctgggctataccgtagtcgatccatgttccgtcgtcgctacgcacctgaaccaccttatcagcacccacacggacgaacttttcggtcgccaggaggcgcagcagctgcttgaccagctcaccaaacagtcgccgaagctgatagaggatttgatccccggggtaatcagcctgaccacgctgcacaaagtactgcaaaatctgctctccgagcgcgtgccgatccgcgatatgcggaccatcatcgacacgctggctgagtatgccactcctcagtctgacgctgacgagctgacggcccgcgtgcgcgctcgcctctcccgggcgattacgcagcagtggttccctggcgacgacgatatccaaataatcggccttgatatgtcacttgagcagttgctggtacaggcaacccagagcggaagcgctatcgagccgggaattgccgagaatttaatgaaacagaccgagcaggcgttgcagcatcaggaagcgctgggtgcgccgccggttctgctggtgaacccggcgctgcgtttgatgctgtcccgctatcttcgtcgcatcttccctcagcttgcagtgctctccagccaggagataaacactcagcgcaacgtgagaatgacgtatctcattggaggtaaatcgtgataagagccgccttgcttgttctgctgcttgcgccaccggcgtttgctgcggacggttcatggagcagccatagttttggcggcacgctgtcgcgcggcaagcaggtactgaaaagtcgtccagttcagcccgccgcgccccttccgaaaggggttacgccgacgcatctgctgtggaagattacaccggacggccccacgccgccgggctttcgcattcgcgtctgtagcagcctgcgctgtctgatgctcagggaactggcgggcgaaatcccgttgccagcgggtttcccggccgcgggcccctttcgctttgagtatcagtcggtagcgcgcggcgaaatgacgtcgccgctgacaatactgaaaaatgaaatcacaataaggtatcgcggcaaggggccatcggcgccttaagagaggttctgacaaacggtaccgctctggcgatatcctgccttaaacctcagcacctcatttatcccgcccagcgccccctcacatgccagcgccagcgtcatcagcatcgtctcatcctcctgcgccgataacatctccatccctaccggcagcccgatacggcttacgccacagggcaacgtaatggcaggcaggccgctgatggcggccagttccggcgcgcagcctggcggcatcttcgccatactttctggtaatcgttgtacggtgggatacacaaatccgtcgatgcgctgcacctccgccacctggcaaaggttctgccgcaacaggcgctgaaagcgacgccccgccagccagagcggggttttcagcgtgttactcgccagcatctgacgtagaaacggcgcaaactctggcaggaaagcgccggagtccacaatgcttgtcagtccggagggagcgccaggctgtttgctaagccagtcgtcaatcgccacgcgaaattcatacagactgaggcaggtggcctgcctcacctcttcaaggaaggggagtgaaacctccaccagcgtcgctccggcacggcgcaacgtgtgcagcgccgactgccagacctccagctgtacctcatcctctccctgtaacgcggtcaccacgccaaagcgaacgcctttcagcgaacgcacaggaagcgcaaccggcggcaggccatggatcaccgcatgcagcaaggcggcatcctcaacgctatgtaccattggcccaacggtatctttgctgggcgagagcggcgccacgccgtccagctgtgaacggcgaaaggcaggccgtagccccaccagcccggtatagctacagggaatgcggatagagccgccggtatcggtacccaatgcgccatccgccattccagccgccaccgccgcggcgcatcctccgctggaacctccggcggtgagtgtcgggcaaagtggattcgccacatcaccccccagcgagctacgcgagcgcacatcgaacgcgaactcggacatattggccctggcaagaataatcgcccccgctctgcgcaatcgctgcacgacccgagcatccgctgtcgcgttaagtgaggccagcgcacggcagccaagggtgatcggcatcggcgcgcaggcaatattatctttgacgatcagcggcacgccgtgcagggggccgatcggctctccacgccgacgctgctgctgatgctgttccgcctgagacatggcgtcagggttaaccccgaggatcgcgttgagcgcccggtgctgctgtatgacgtcgagacggcgggcaatttcctccggacagtcgtctggcggtatcaggcgcttcatagtctcaggctccccgtgctgaaaaccgggcagaaggctgcccgggatacgttttagtcccgcatgccggtagtaatggcatcaatgtcctgcggacgcagacgaatttccgccgcccgtcggtgcccctgcatcccctcggtacggctctggcggatcgccggttctgcgattgccgggataccctgctcgtcaatccactgatgggtacagattttgacgtatgcccctacccacagaccgccggtatagcgtgccgccgccatcgtcggtaacgtatggttggtgccgcagcatttatcggagaacaccacgctggcgttctgaccaataaacagcgagccatagttgcggatcttcgctgccgtcgcgtgcggatcgcgggtatgcacctgcaaatgctccgtcgccatatggtcagcaaacgcaatcagctgcgcttcatcttcgcagagcacaatttcaccctgccgacgccacgcctcgcccgccgtggcggccgttggcaggctggcaagctgacgctcaacctccgccagggtacgctcagcgatatcccggctggttgtcgccagcccgacgcgggtatgaatatcgtgctctgcctgcgccagcatatcggcggccagaatgcgcggatcggcgctgtcgtcggcgatagtgaaaatctcgctcggcccggcgagggcatcaatgccgactcgaccaaacacctggcgtttcgcttcgttaacgaaggcgttgcctggcccaacgattttgtccaccgacggaatactctccgttccccaggccatagccgcaatggcctgcgcgccgccaactttgaaaatgcggtgcgcgcccgccagatggcaaactgcaatcatcgccggatgggcgcccgggggcagacaggcgataatctgttcacagcccgccaccgtcgcaggaacaatcgacatcacgggtgcggagagaatcggataccgtccgcccggcacgtagcagcccaccgtctgcaccgggatgatccggtgaccgagatgcacgccaggcagcgtctctacctccagcggcagcatggtcgccagctgcgcctgcgcaaaacgacgcacctgattaatggcaaactcactgtcgcggcgcgtctgggcatccatcccctccagtgcttcggcaatctcctgctcgctcacctcaaactgcgccggtacgacatgatcaaactgctgcgaaaaggctcttagcgccgtatcgccctcggttttcacgcgctcgataatggcgctgaccttctccgtcagggaacgatcggcctgcgcatcctgcccctgcgggcgcttaatccagctcacctgatttaacatttacgcgtcctccatctggccgagtttgatctgcgccagcagcgccagatggtcataaaccacccactcatcaacaatttttccgttgacgatgtggtagtgcgacatgcccatcacgaacagtcgttctccggtcggcttgccgagttcgccgtaacccaggtgatgtccttcgataatccagcgtacggccactttgacgccgccttcatcgcacgggttggaacaaatatgctgcggcagccacgcgccgtcagggatcatccccaccagcgccagcgtctgatgggttaccgccgcggtgccgtacagctctttcatcagcggaccgtgccactgtacgttaggcgcatacacttctttgatcttgccaaacatccggcggttgtagatctcatgcagccagcgcaggcactgctcctccgtatcggtgtgcgcaatggaaacatcgcactccatctccggcggatattgccccagcatacggccgttttcgccgatgtccatcacgcggaagcctttatcgaactgctcctttgccatattaaatgcgatttgatcggtattcaggccaagctgtttcatcagtgacatattgtcgctgaccacccactcccgataaattttattctcgtggatcatgcaatccgccacggtacgcgtcacaaacgtacggttcgtcggcttacctaaatggctgtgctgggtatgccgcccgcttcccgtcaccaggtgagaggtataaaaaccgtcaacatcatttccgttccagataacctgggttgccattccgcgccgttccgggaaggcaattaagcgttgcagcgtatcctgtaccacctgttcgcggttatagagtgtccccagcgcgttatacagcacgcagttatgggtatagtgagaataaattaagccaacatcgcgctcgtcccatattttatgggtgcagcgaacgatataatcgacaatatcggtatagcagtcatcaaagccgcgtaatgattgcacgcgcggtcttttttccggtaccagatcgacaaaatcacgacgttccacctgtaatacaggttcctctttcagcgatttcacgctgcttttttcgggtacggctggtgctttatttgttgcttcggtggaagacatataaactcctgctctgttttcagacaataagaacccgcacccgtaagtgagggtgaattaaacacggttattttttgcagccggaataagggggctgccgccccattaattaaatatttgcgaccaaatcgctaattcatcgatccccagatattcacggaaaattaaaccatcacgtaattcaagctggctgataccggtaattgatatgggtttacgggtcggcgcaccaaatttgccgtaaccgtcatgccaggttaacaacgaccagcgcaatgaaagtcgaatcggctcattaggatctttacgcacaatcaggtgatgaagctgcgtttcgctgtcggcaaatgaagcgcgataaccggaaagctgtgcgccaatttcctgttcgccggtgcagaggcagtgccccggcgcgtacagcgtcgccgccgggtgatagagaccgggcaccacgccgctgttaccgcccgcccacatcgttaagtagcgctcaacgaccccggcaagcgccccttccacgtcgtcgccctcaggcccacccgcccagcgggcgtccagcgtctcagcagacacagattccagcccaagctgctggcgcatggtcgccaggttaaaagcaaagtcgcggacatccagccccagttgcgccacaatcgcggcacgatcctgaagcagccactcctggcgtacggcaccatcaacacagatgcgatcggcccaggtgcggacccagacatttttcccggtcggcgggccaaaaaatccctccccctggtgctgaatgcgggctacggtacgctgcgccgcatagtactcgtcccccgggttctggctgcacagaatatcctccgtcagcaccgctcgctgcgggaagctgtgcatcgcctcaagcgtcaggcgcataaactgggaaagctcatgcagctgtttttcgggggtagtgaaaaccaccggcgtggcgtaaaaatccgccagctggccgatatctttctgctcccacaccacgtgcgtcagcgtcaaaatgaactgctggatagagtcgaattgagggctgaagccccgcaatctggtcatgtgcgctccttagactggaatagcgttaaaccattggtttcgataacgccgctgcgtgggcgacgcgccgagtggcgtatcaccagcgtaccgggcaccgtaatctgttcaggctctatggttccgctgtcaatttgcttcattaacagttccaccgtggcatccaccatcgcgccgaccggctgcgacgccgaggtcaacgcataagagggccagccggaagggccgatgtcgtcatagccgacaacggagacctcctccggaatgcgcaaaccaaactcatagcgcgccacatccattaccgtgacggccatatgatcgttggcgacaaagaccgcatccggcgctggcgacgtcgaaaacagggtataggctgcccgggtggtttgctgagcgtcgtaattcccgtgcaccacccggacatcggtgatgccatgttctccagcgtggaaatgaacccgcgctggcgggcgatattgaccgnnnnnnnnnnnnnnnnnnnnnnnnnnnnnnnnnnnnnnnnnnnnnnnnnnnnnnnnnnnnnnnnnnnnnnnnnnnnnnnnnnnnnnnnnnnnnnnnnnnnnnnnnnnnnnnnnnnnnnnnnnnnnnnnnnnnnnnnnnnnnnnnnnnnnnnnnnnnnnnnnnnnnnnnnnnnnnnnnnnnnnnnnnnnnnnnnnnnnnnnnnnnnnnnnnnnnnnnnnnnnnnnnnnnnnnnnnnnnnnnnncggcaatctgccgcgccggccgcttcgttattactgttgacgctggaggccatgccactctcttcgctgcggttaaacagcactaccgggatcccggcggcaaggcactcctcggataactccagcgacagcgtcaccgaggccagcacaatgccatccacccggtactgcataatctggtcaaaaatacggtctacgttaccttcccgatcgccaacgaacagcagcaggtgatagttcagcgtatccagcttttgcgccagcgcctccagcacctgcgagtaaaaggggttatcaaagtaagaaatgacgacaccgataatgcgcgaacgagccgtgttgagcgaacgggcgatcgcattcgggcgatagcccagctcgcgcgctaccttcagcactttttcacgcgttgccggtgaaatgctggcccccggcgtgaacgttcgcgacaccgcagattgcgatacccccgccagctgagcgacctgttgggatgtgactgctgcaaaagtcttacgtttcattacccctgattccttatcaacgtcctgcccatttgcgcgtgcttcaaacgcctcagcaagtgggtgttttttatacttacaccacctttgcatgcgtatgcaacacaaaaaattaaaattctcacaacaagatcgagatcactttacaaatgtgaaaccttttcgtaacttcaaatcttgaatacgtatgcaaagagttttcataccgtcaatggtaccggagagaacaggagtcgcccaaaggattgaaccggtaaacgtcgtccctgactggttataacccattaattcttaagaggttcaaaaccatgtttcaagcactgttacgccgtcgggaagcccggctctttttcatcatcagcatcctgttctttatctgcattcatagcattgatgcattcctggcccccatgatgatcaaccagggcattgagccacagatcatgggcatcatcatgggcgcgtccggtctggcaacccttctgatgcgcttcccgttaggcattatttccgacgtggttaaaagccgcaggatcttcatccagattggcctgctgctgccaattatcgcctggccgattgcctggcttgaacccaacgccattacgctgtatctggcgaaagcggcagacggtgtcacggcggcgacctgggtactgtacaacatcctgttcatgcgttacttcggtcgcaacgaagcgcctgccgccgtcgcgctgctggcgctggcagggcccatcggcgtgtttctcggtaactgtattggcgcggtgctgattcactatttcgccaataacatcgccttttttgtctcctgcatctccgccctggtggcgttattcctgacgacccgcattcaggacgtgcacgacccggttcaggcccccacgcttaaagcctgcattaccggcgcgcgccagcagctggccgaccgttccgtctggctgattggcatcctggcgaccgtcgtcattctggtgcccttcgccacccgcgacacgctgacgccggtctatgccgagcagcttggcgcccgggcggggatcctcgcgctgctgggtaacattcaccttcttttttacgggctggccatcgccctgtgcagctcggtgttttatcagcgccttgggctggtaaaaaccgccgtgctcggcatcgttttacaggtgatttccactttcggcattccctttaccagcaatatctatgtgatttacctgtggcaggcgctggcggggttctcgttcggtatggcctttgccgcattcatgtcgctcagcgtagtgaatacctcgtctgatgaacaatccacgcgaatgggactattccagaccatttattcctgcggcatgtttgtcgggccggtaatgatgggcgtaatgatgcaacatattaacctgtcgtccggttatatattgattgccgccctttccgttgtggccgctattgccacgccgctgtccgctcgatgggtatatgcccgtaaaacgcaaacctcagcccaattattaaaaaacggtgcgtacgctgccgcgccggatcaataactctttctgaagtaaacaccctttcccggctcgccgggaggacaactgacatctgaaaaaggtaaggagaagcgagtgtcctggaaattaaaaaccggtaaatctaccgaagagcgccagcaagccaaccagcaaataagagaaacggttgaacaaatacttgcggatattgaaaaacgcggaaataaagccattcgcgaattatccattaaattcgatcgttatgaccgtcaggattatcgtctgacgtccgcggagattgaccgctgcataaaacagttaagccgccaggatattcaggatattgaatttgcccaacagcaggtggcgaattttgcccgcgcgcagaaagaatgtctgcgggacctggaaattgaaacgcgtcccggggtgatcctcggacataaaaatattccgattaacgccgtaggatgttacgtgcctggcggaaaatatcccctgctcgcctccgcgcacatgtcgatcatcactgccagcgtggcggggtgttcaagaatcatcagctgtgccccgccgtttaacggtcagcccgccccggcgattgtcgcggcgcaaaaaatggctggcgcaacggaaatctatgcccttggcggcattcaggcgataggcgccatggcgctgggcacggactcgctggcaccggtcgacatgctggtcgggcccggtaacgccttcgtcgcggaggccaaacgccagctgttcggccgggtaggtatcgatctgtttgccggtccgacggaaacgctggtgattgccgatgacactgttgacgcggaaatgtgcgccacggacctgctgggccaggccgaacacggcgtcaccacccctgccatcctgctgacgaactcgcttcaacttgccaaagagacgctcagcgaagtggaacggctgctggaaaagctccctaccgccgacattgcccgccagtcgtggcaggactacggggaaatcatcgtctgcgacagccacgaagagatgctgctggaggcagatcgtatcgcttccgaacatgttcaggtgatgaccgaccgggacgactggttcctggctaacctgaccaattacggcgcgctgttccttggaccgcgtactaacgtggcctacggcgataaggtgatcggcaccaaccacaccctgcccacgcagaaagccgcacgttataccggcggcctgtgggtgggcaagttcatgaaaacctgcaccttccagaaagtcctcagcgacgaagccactgccgaaatcggcagctattgttcccgtctgtcgctgctggaagggttcgccggacatgccgagcaggccaatattcgcgtgcgccgttatggccagacggaagttccctacgccacaccggccccggtcagggaaaaggtgtaagtcatgacgcttttgcaaacgccctctttcaccctgcacggcaaacgcgcgctggtgaccggcgggtcaagagggattggcttcgccgccgccgtcgccctcgcacaggcgggagcagaggtatggatcgccgcccggggccgcgaggcgctggcgcatgccacaggtctggcagcggaacacagtctcgcatttcacccgctggaactggatattaccgacactcaggaggtggcgcgtgtgctggcgacgttgcccacgcccgacattctggtgaacagtgccgggctggcccgccaccagccgtttcttgaggtgaacgaggataatttcgatgcagtgatggcgcttaacctgcgcgccaccttttttatcagccagcatgtggcgcgcagaatgcgggcgggcggtaaggggggatcgattattcacatctcatcgcaaatgggacacgttggtggccccgagcgtagcgtgtactgtgcctccaaattcgcgcttgaagggttaacccgaacgatggcgctggagctgggcgatgcggggatccgtgtcaatacgctgtgcccgaccttcattgaaaccgacctgacgcgttcgtcgctcgccgacccggcatttcgccgctatgtgctggacaacatcaaactgcgccggccaggcaggctggaggacattatggggccggtagtgttcctcgcctctgaggccgccgggctgatcaccggcagcgccctgatggttgacggcggctggacggctacgtgagggatgcaatggaatatccgcttctggacaataccgatctgccgctggtgctgcttggcggcacgctgtgtaacgcccggctctggcagcccgtcattgaacggctgaacgtctcagcggtgctgtgcatcacgctgacgggcgcagagtccgcgccgcaggcgtcacggcggttattaaaggttctgccgccgcgctttctgctggcaggcttttcgctcggcgcgattgtcgcgctgcaaatggccgccgacgcgccagaaagagtgaacgggctgacgctgatttccgttaatccgttgcccgttgcgccagacacccttgcttcacgccgggaagcggtacacaccgcacaggcgcggggcctggccgactggctggtctcgtcgctgtggcagagctatgtcgccccgtcacgtctgtccgatcggatcctgcaagagactatttgccgaatggcgcaagagtgcggcattgagacctttgcggagcaaacggaaatggccattcaccggcaggacaaccgggctgcgtttaacgccctctcctgccccacattacttctaaacggcgcgcaggacgttatctgcacgccccatcatcatcagctactggcagcaggcaacgcgaacgtgaccaggcatacggtggaggctggcgggcattttattccgctggaaaccccggatgagatcgcgccgctgctgcgtcagtggataacggagtgcatacagtgcgcaaaaacagtttaaagaccgcatttctggaaaataccccgatcgttaacggctggctggcgatcccgtccgggtatagcgcggaaattatgggccatcagggttacgacgccgtcaccgtcgatttgcagcacggcatgattgattttgccagcgcattgtcgatgctacaggcgctatcgagcacgcctgccgtgccgctggtgcgggtggcagataacgatccggcgcaaatcatgcgcgtattagacgccggcgcgtatggcgtaatctgtccgatgatctccagcgcggaacaggctcgccgttttgtcgctgcctgtcgctatccaccgctgggtgttcgctcctttggtccggccagaggtctactctacggcggcagtgattatccacagcacgctaacgacgagatcctgacgctggcaatgatcgaaacccgcgaagggctggcggatcttgacgccatccttgataccgaagggctggacggtgtgtttattggccccaacgatctctcgctgacgctgaccggcagcgccagcgccgaatcccaacatcccgaaatgcttgctgctattgagcgggtgattcactgctgccgccagcagcagaagattgccggtattttctgcacttccggcgcggccgccgcagcgcgtattgcgcagggtttccagtttgttacccctgcaaacgacgttatgcagctgggtcgcgcctcacgtgaagcaattgccctcgcccgcggcaacgccatccctaccaccggtgcatccggttattaaaaggagaaatgatgaaaactatccatcttagccagagccaggcacgaacacggttaatcgcccccgacgatatggtttcctgcaatcttgcttttattgattgcaagctgcccggttcgcaactcaaacaaaactattccttcatcggcccgggtgtaactcagtccagcgagcagattgttaatatccccgagccgcacggctttaacattggcgcggcggctatgccgaaaggggtaaccaataacctgcatctgcatttcaccgcagaagtgttcctgatccatgaagggacatggcgttttcgctggggcgccaacggcgagcatgaagcggaatttagcgcgcccaccatcctctcaataccgacctggatcttccgcggtttcaccaacgtcagtaaagaagatacctgcggcatggtatttaccgtgctcggcggggacaacacgggcggcatcatctggcacccgtcagtgctggcggccgccagcgagtacggtatgtatctcagcaaggataatatgctgattgcgcaggaggcaggtgaaccaatgcccgatcccgccacgctgctgacgccgctgtcagagcaatatattgccggtctgcgtgactacagcgttgaggagatgcgccagcgtgcggtaaccggcgatgatcgctgctggtcagcgcagggactgctggactcggtgctgccgggacacggcggcgaaattgcgccggttatcggtttcggcatttcacaggatcgggattccgctcccgctatcctgagcccgcacggtttttccgtcgaatggctgcggcttgctgacgaccacattgtcggtcgccatctctgcccggatattcaggtgatcatggtctttaaaggccagctggaggtgacctggaacgaggcgggtaaggaagtcagcattatcgccccggaacgttcggtgatctccattccggcaaacagctggcgccgctaccgcgcggttgatggcaatgtggagtttattctgacgacccggggcgatcagcgtaagcgcctgtactgggacgaagcgatcctgcaccaggcgagagaacacaatcgctgtctcgatcctgatggctacgtggcggatgccgacatcctgccagccacggcccgtcgggccggagaaaaagttgaaaaagtgccagcagctaactgatttttacggcaaagtggcgcaaaataggggggcagggatcgcctgcaccatcatcaataatgatgcacataaaacggattgcatgataaacatggatggaaaatcaaatgtacagacccatagtcgttatcctctttattcttctgacgctcgccgcactgattgaaatggggattatctctttcggctaaacctcccccctcagaaaggccacatttgcggcctttttatttatgaaatatgtgaagtcgacagtttatttttatgcgtagcagaatccaaacccaaaccgaaaatatattttattaatgcgattctttgaaatatatcatacagcagatgatttaccctaacttaaatcataattaagcagtcattaatattcgctggaattataaataaagcctgtgtattcagtattatccccctatcatctcttccactacctaatcccgaccgcctgtacgccaacgcctctgtggcgcggtccgcatagccaacaaaatatattcgcgctatcaattaattttctctgcaatcacagtgcagggtttacagacacttaatttgcacattcagatatttatagctatatcatttttacagcaaaataaataatacctgcacaaataataaggcttataaaacacgaaaatataaataaataacagtttctcatgtaaataattagcttcgccctgatgttgccacgttgattgctggcggatctcggtcgctctaaagaaagcaacggtaaatactgttttattcacagtattttcgccgggagcgccctcatcccttcagaaaatatggccacgtctgacacgccgtaaacaataactctgttggagtaataactgtatgagccaaatatctgttatatcgaaactaactggcgtggaaacgaccacggagggaacacaggtaacactcgatcactcctcaatcgttaaacttaacgtggatcgcgccgatatctcaggttactcccgcagcggaaacgatctggtgattaccctccactcgggcgaagtgattaccctcaagaatttctacatcaccgacgcgcagggcgtgagccagctggtgcttgaggagagcgacggtgcgctgtggtggattgaagatccaaccggtgccgccacctatgaatccatcgcctccacggacgccctactggcggcgtcagggagtgataccggcggcgccgcagcgtggccctgggtgctgggtggcctggccgtcgcaggtgggattgccattgcggcgggaaccggcggtggaggtggcggggatgacgataacaacagtccgaatcccggcaatccgggaaatccttccgagccagataccacgcctccggatgcccccaccaatctacaggtctcacctgacggcaaaaccgtcaccggtaccgctgagccgggcagcacgattaccctgaaagatgccgatggcaacaccatcggaacgggcaaggcgggtagcgacgggaaatttacgattgatctcggtacgccactcaccaacggggaacagatcaccgccnnnnnnnnnnnnnnnnnnnnnnnnnnnnnnnnnnnnnnnnnnnnnnnnnnnnnnnnnnnnnnnnnnnnnnnnnnnnnnnnnnnnnnnnnnnnnnnnnnnnnnnnnnnnnnnnnnnnnnnnnnnnnnnnnnnnnnnnnnnnnnnnnnnnnnnnnnnnnnnnnnnnnnnnnnnnnnnnnnnnnnnnnnnnnnnnnnnnnnnnnnnnnnnnnnnnnnnnnnnnnnnnnnnnnnnnnnnnnnnnnnnnnnnnnnnnnnnnnnnnnnnnnnnnnnnnnnnnnnnnnnnnnnnnnnnnnnnnnnnnnnnnnnnnnnnnnnnnnnnnnnnnnnnnnnnnnnnnnnnnnnnnnnnnnnnnnnnnnnnnnnnnnnnnnnnnnnnnnnnnnnnnnnnnnnnnnnnnnnnnnnnnnnnnnnnnnnnnnnnnnnnnnnnnnnnnnnnnnnnnnnnnnnnnnnnnnnnnnnnnnnnnnnnnnnnnnnnnnnnnnnnnnnnnnnnnnnnnnnnnnnnnnnnnnnnnnnnnnnnnnnnnnnnnnnnnnnnnnnnnnnnnnnnnnnnnnnnnnnnnnnnnnnnnnnnnnnnnnnnnnnccggatttaaccgcgccggatgcacccgagattgtcaccgtcaatgataacgtgggcgccgaaacaggcccgctgagcaacggacaacgcacggacgatgcgcgtccgacgttcagcggcatcagtgaagccggcaccgtcattaccttctatgacaacgggaaaccgattggcaccgccacagccgatgccaccgggaaatggagctttaccccgtcgaccaacctgtctgaaggcaaccacgccattaccaccaccgcgaccgatgccgcaggcaataccagcccggcgtccacggcggtaaccttcttggtcgataccgtcgcgcctggcgcgccagcgatcgtcagcatcaccgatgatgttgcgcctggcaccggcacgctcgggagtggaagcagcaccaacgacccgcggccacagctcaccggcacggcggaagcgggctcgacggtcaccatctatgataacggcattgccattggcacagcggttgtgggcagtaacggaagctggagctttacgccgtcggtgaatctgagcgaaggcagccaccagcttaccgtgcgcgccaccgacgtcgccggtaacactggcccggcctcgccggtctttaccgtcacggtagatgtcaccgcgccgcaaacgccttccggatttatcattaacgacgacacgggcgtactgaaaggagcgatcggtgccgggcagtttaccgatgcctcagagccgcgcctgacgggcagaggcgaaccgggcagcacgatcacggtttacgataacggcgttgttatcggcaccaccaccgttctgccgaacggtacctggagcatcacgccgacgaatccactggcagaaggcgcacactcgattaccctgcgggaaaccgatgcggcaggcaaccagagcggtctgtctcagccgatcaactttaccgtcgatcttacgccgccagacatgccggttgcgacgctcaactccgcaggcacccagatcaccggtaccgccgagccgggcagtaaaatcgtcatcaccaacaatgccgggctgcaaatcgggaccgccactgccgacagcaacggcaactatgtcgccaacctgaaccctgcgcagaccaacggtgagattatctccgtggtcgcctccgatgccgcaggcaaccagagctcaccggcgctggttaacgcagcggatatcaccccgcctgccgcaccgggcaacctggtggtggcggaagacggggccagcgtcagcggaaccgccgagccaaacagcacgattatcattaaagcgccggacggtacgatcatcggccaggccaccgccggtccggacggcacatttaccatcccgatttcgccagcccagaccaacggcgaagcccttgaagtgacggccaccgacggcagcggcaacaccagcccgtctggctttgccgacgcgccagacagcacgccaccgctggcgccggaaaacgtggtgatctctgccgacggcaccaccgtaaccggtacagccgagccgggcagtaccgtcaccattcgtgaaaatggcgtgaaggtcggggaagcggtcgccgacgatcaggggaatttcagcgtagatctgatcccgccgaaagccaacggcgaagccctgaccgccgatgccactgataccgccggaaacaccggtccgaccgcgccgtttgacgcgccggacatcaccgcggcacaaaccccggtcatcacgggcgtggtggatgatgcccccggcgtcaccggtcctgtcagccagaacggtctcaccaacgacagcacgcctaccatcaacggaacgggcgagcctggcaccaccatcaccctctacagcggtactaccgaaattggcaccgcagtcgtgtcggcgaacggtcagtggtccatcacgctggaaaccgcgctaccggacggcgggcacgtactgacggcgacggcggttgacgccaacaataacctcagcgggacatcgaacacctggagcatcacggtggataccgccgccccgggcgcgccggccattacgcaggtcattgatgacgtaccgggccgcacgggtgcgctcgacaccaatgaaaccaccaacgacacgctcccgacgctgaacggtaccggcgagccgggctccaccgtgacgatccgtctggacggacaggatattggtactgccgttgtcaacagcggtggcgcatggaccttcacgcctactaccccattagtgaacgggcagcatacgttcaccgtcgtcgcgagcgatgcggccggcaacgccagcgcaccatcagccggctttacctttaccgtcgatacgactccgccaccggcggccaccattgacaccgtttccgataacgtggggcccgtgcagcttccgcttaacagcggggacaccaccgacgacacgctgccgcagttgcagggaaccgcaccggacggcaccaccattacgatctatgacggaaccaccctgctcggcacggcggtgctcgacggcagcggtggctggagctttacgccaaccacgccgctgacggacggcccgcactcgctgacggtccacgcaacggatgaggcgggtaacaccaccatttcgccgccgtttgaactggcgatcgacaccaccgcgcctgcaacgccggatattcctgagatcaccgtcaacccggacggcggcacgccggggacggccctgaatcctggggagaccacccgggataccacgccaaccctgagcggctcgggcacgccgggcgataccgtcaacatttacgatggtgccaccaaaattggtgaagccgagatcgatggcgacggtaactggagctggacacccaccactccgctgcctgacggcacctacgatctctccctgacggtgaccaaccaggacagcgccgggaacgaaagcgccccgtccacgccggtgaccattaccattgataccgacgcgcctgcccagccgggaaccccaacggtgacagacagcgtaagccagatcaccggtcccgtgctggatggcgaatccaccaacgatccgcgtccggtcctgagcggcaccggtacgccgaatgacgtcattaccatctatgaccaggtgggtacaggcgagccgcaggccgtgggcagcgttacggtggacggtaacggtaactggagctggcgtcctgagaacaacattggcgaagggacgcacgaatacacggcgaccgccaccgatgaagccgggaacgaatctgtgccatcagccggtatcacgataacggtcgataccctcgccccggacacccctgttatcagcgacatcgccggcgcgcagaacggcgggtccactaacgacaccacaccgaccctgagcggaaccggcaccaccggcgagacggtgatcatctacaacaacggcgtggaagtggatcgcgttgaagtcgtcaatggcggatggtcctataccctgccgacgcagaccgacggcccgctgaatatcaccgtcgccgcggtggacgatgccggtaacgttagcccggtaagcccggtctttacggtggaggttgatacgcaggcgccaaccgtgccgcaaattgacgccgtctctgacagccagctgaccaacagcgtgctttacacccgcgacggtacgccaaccctcaccgggattggcgagccgggttcgagcgtcaccgtttctgttgatggtgtcgcctcgccggtggtcgtggaggttcagccgaacgggacatggtcctggaccgccgaccctgcgcttaccgaggggccgcataccttctcagtggccgcgagtgacgcggcggggaatacctccgccagctccggcgatctcagcgtgacggtggataccctgccacctgcaacgccaacgaatatcaccattgccgcggagggcaccccgctgaccggtacggcagatgacggaaccacggtgacggttcgtgacgccaacggcaatatcatcgggaccggggtcgcgacgggaggcaacttctccattgccctctccccggcccagttggatgccgcgacgctgacgctcaccgccacggaccccgcaggcaatgccagcccgtcaaccacctttgacgtgccggactctccgctcgagctgcctgcggtgccggtgattacggcgatcaacgatgacgtcgatcccgtcactggtgatgtgaaagataaaaccaccaatgacgtcacgcctacccttaccggcaccgccgatccgggcagcgtgatcgccatttatcaggatggggcgctggttccgctgacgaacgttgttgcggatgataacggcaactggagctacacgccgctgttgccgctgacggaagggccacacacctttgccgtgaccgccacaaacatcaccaccggcgagaccagcggacagtcgccgattgcgaccgtcaccgtcgaccttaccgccccgacagcgccagccatcggtgcggtgactgatgacgtaggtccgatcaccggcccaatcgccgacgggcagagcaccaacgacaaccgtcctaccctgaccgggacaggcacggccggggacaccattaccgtgtacaataacggcgacccgctgggcaccgttgttgtcggtccgaccggcacctggagctacacgccgcctgcgctggacgacggcagccacaccctgaccgtgaccgccaccgacccggcgggcaataagagcaccccgtcggccgggatcaccattgtggtcgacaccgtctccaccacgccggtgattaccagcgtgacggataacgcaggcaatgcggcaacgcctgtcccaagcggcgatccaaccaacgacaccacgccaaccctgaccggtaccgccgagccgaacagcgtcgtcgccatttttgatggcgccacgcagattggtacggtggcggcagacggtaccggcgcctggacatttacccctgaaaccgccctcggggaaggaacgcatgactttacggtcagagcgacggatccgcagggcaacgtcagccagccgtccggcgtctggagcatcaatatcgatctgacggcgccacaggtgccgacgatcgatacggtcagcgacaacgctccgggtggcgtaaccggcccgcttaccgccgggcaggtcaccaatgacaccacgccaaccctgagcggcaccggccaggcgggtaccaccattcacgttctgaataacggcgtagagattggtaccactacggtcgacggcaacggtaactggacctttacgccggacccggttctgacggacgggacgtataacctgcgcgtcaacgccagcgatgatgtcggaaacgtctccgccaactcgccagtgttcgcctttacggtggataccaccggccctgcggccccggtggtcaccacggtgatagacgatgtcagcccgggaacgggaatcatcgccagcaacggttccaccaacgacacccgtccaaccttcaacggtacgggggaagtgggcgcaacggtgcacgttattgtcgatgatgtggaaatcggcacggcggtcgtcaacgcccagggtaactggaccttcacgccgaccaccgcgctgggtgaagggccgcataccattaccttcaacgccaccgatgccgcaggcaataccggggtcacctcaccnnnnnnnnnnnnnnnnnnnnnnnnnnnnnnnnnnnnnnnnnnnnnnnnnnnnnnnnnnnnnnnnnnnnnnnnnnnnnnnnnnnnnnnnnnnnnnnnnnnnnnnnnnnnnnnnnnnnnnnnnnnnnnnnnnnnnnnnnnnnnnnnnnnnnnnnnnnnnnnnnnnnnnnnnnnnnnnnnnnnnnnnnnnnnnnnnnnnnnnnnnnnnnnnnnnnnnnnnnnnnnnnnnnnnnnnnnnnnnnnnnnnnnnnnnnnnnnnnnnnnnnnnnnnnnnnnnnnnnnnnnnnnnnnnnnnnnnnnnnnnnnnnnnnnnnnnnnnnnnnnnnnnnnnnnnnnnnnnnnnnnnnnnnnnnnnnnnnnnnnnnnnnnnnnnnnnnnnnnnnnnnnnnnnnnnnnnnnnnnnnnnnnnnnnnnnnnnnnnnnnnnnnnnnnnnnnnnnnnnnnnnnnnnnnnnnnnnnnnnnnnnnnnnnnnnnnnnnnnnnnnnnnnnnnnnnnnnnnnnnnnnnnnnnnnnnnnnnnnnnnnnnnnnnnnnnnnnnnnnnnnnnnnnnnnnnnnnnnnnnnnnnnnnnnnnnnnnnnnnnnnnnnnnnnnnnnnnnnnnnnnnnnnnnnnnnnnnnnnnnnnnnnnnnnnnnnnnnnnnnnnnnnnnnnnnnnnnnnnnnnnnnnnnnnnnnnnnnnnnnnnnnnnnnnnnnnnnnnnnnnnnnnnnnnnnnnnnnnnnnnnnnnnnnnnnnnnnnnnnnnnnnnnnnnnnnnnnnnnnnnnnnnnnnnnnnnnnnnnnnnnnnnnnnnnnnnnnnnnnnnnnnnnnnnnnnnnnnnnnnnnnnnnnnnnnnnnnnnnnnnnnnnnnnnnnnnnnnnnnnnnnnnnnnnnnnnnnnnnnnnnnnnnnnnnnnnnnnnnnnnnnnnnnnnnnnnnnnnnnnnnnnnnnnnnnnnnnnnnnnnnnnnnnnnnnnnnnnnnnnnnnnnnnnnnnnnnnnnnnnnnnnnnnnnnnnnnnnnnnnnnnnnnnnnnnnnnnnnnnnnnnnnnnnnnnnnnnnnnnnnnnnnnnnnnnnnnnnnnnnnnnnnnnnnnnnnnnnnnnnnnnnnnnnnnnnnnnnnnnnnnnnnnnnnnnnnnnnnnnnnnnnnnnnnnnnnnnnnnnnnnnnnnnnnnnnnnnnnnnnnnnnnnnnnnnnnnnnnnnnnnnnnnnnnnnnnnnnnnnnnnnnnnnnnnnnnnnnnnnnnnnnnnnnnnnnnnnnnnnnnnnnnnnnnnnnnnnnnnnnnnnnnnnnnnnnnnnnnnnnnnnnnnnnnnnnnnnnnnnnnnnnnnnnnnnnnnnnnnnnnnnnnnnnnnnnnnnnnnnnnnnnnnnnnnnnnnnnnnnnnnnnnnnnnnnnnnnnnnnnnnnnnnnnnnnnnnnnnnnnnnnnnnnnnnnngctcctggagctacaccttcctaaataaacagacggaaggtcagacgctgcaaatcaccgccaccgacgcggcaggcaacgtctcgctgcccggttcagcccttgcgccggtggtgccgctctcagccagcaccaacgttgaagagctggcgctgacgaccaccgcaacggtgaccaactcgcagtacagcgactatggtttcctgctggtgggcgccgtaggtaacgtgctgaccctgctcggcaacgacaccgcgcaggtaggtttcaccgtcggcagcggcggcagtgcggatattgccgtgaacgccaacgccacgggtgccgttctttccctgctcaatacccttgagctggtggtacagcgctttgacgccgccaacaacacctggaccaccgtggtcgacaccggacagccgcagttcgctgacctgctgaccctcggcgcgacgggggtgtcgctgaacctgaccggcctggcggatggtcagtatcgcgtcctgagctacaacactaacctgctggcaaccggctcttacaccagcctcgatgtggcggtgaaagagaccagcgcaggcaccgtgtccggcgagaccagcgttgtcgggaacgtcatcaccgacgtggacccaaccgcaggcagcgacaacgccccggcgggcaccaccgtcaccgcggtcaccaacgcccagggcaccaccaccagcgtcacggctgacggcacggtgattcaggggcagtacggcacgctgaccatcaacctggacggcagctatacctataacctgaccaacaccagcgccgccgtcattgggcgcacggagaactttacctacaccatcacccacaacggcaccagcgcctcggcaaatctggttctgtcgctgggcgaaggcaccagcagcagcggtatcgtggccgtggacgataccgcctcgctgaccttcgataccaccgtggaggcgattaacaacggcacctcgtcgcagggcggctttaccctggtggggatcaaccttggcaatacgctggggctgaacctgctggacgatctggccaacccgatcatctataacgtggaagaaggcaccacccgcaccatgaccgttcaggcgtccgtgggcggcgtggcgctggcctcggtgttcgacctctacatctataagttcaacaatgcgacgcagaccttcgagcagatgcgcgttgaacccggctggctgcgcgcgccgctgctgggcggcacctcctcgcagctgacgctgaatctgcccgccggcgagtacctgttcctgctcaatacggcggcggggatcaccgcgctgacggcctacacgctgaacgtcttgcaggatcatgtctacagcgtggcaagcgtgagcgagagcacgaccggggatgtactggcggatgatattgcgccagcgggtaccgtagtctccgacgttaacggcgtggcggtgaacagcagcggtctgacggagatcaccggcgagtacggtacgctgcggatcaacgcggccggagagtacacctacaccctgaacagcggggtcggcgcggaccatatcagcacgccggataccttcgtctacaccatcaccgcgcctgacggctcgaaagacacggcttcgctgaacatcaccccaaccgcgcgcccaatggatgcggtaaacgatgtcagcaccgcgatggacgtcacgtcggttcaccatacgtcaacctatacggatacctccgtcggcaccgccagctggactaccgccctgttggggtcaacgcagggcagcggaagcgggaccttcgtggtggatgcaaacaccgcgctgcataatgcctcgctgcactttaacgtggcctcgctgctggcactgggcgggctgacggtgaactggtcaatcactgacgggacgaatgtgattcgcagcggctccttcagcggaggctcactgctgggcggcagcatcgacgttccgctgaccgggctggatctcaacgccgggacctatacgctgaactttaccggcagcgtaccggggctgagcgtggggaacatcaccattaccccaagcgtaaacggcacgacctactccctgtcgcaattcgacgcgacgggcacccacaccgttgacggcaatatcttcgacggcaccggctccgcaggggcaatggaccagctgcactcggttgatacccgcgtgagcatcaccggcttcgacggcgtgaccaccacgctcgatccgtacaccggcagcacgatgtccaacatcacgggccactacgggacgctggcgattgccgctgacggcagttacacctataccctcaacccggggatctcgctctctaccattaccagcaaggaggtctttaactacaccctgaccgacgccagcggcaccacggataccgcgtcgctgaccattgacatggcgccgaagtttgtcagttcggagcataacgatgtgattagcggcacggcctacggcgacacgctgatttatcaggtgttgaacaatacggcgggtaacgctaccgcaggtaacagcacgggcgaccactggacgaacttctccctcacgcagggagacaagatcgacattggcgatctgctggtgggctggaacggtagtgcgtcgacgctggggaactatgtgtctgtttcacaaagcggtaacaatactgtgatctccatcgaccgtgacggcacgggagccgcctacactaaatctgcgctcgttacgctggacaacgttcagaccacctacgacgagcttgtaaaccagcaacacatcattacctgatagcacctgcaagaaatgacccgggcgcgcacagcgcccgggcataaacaaaaaagcagtacttttttattagggacaagacatgggaaagaagatgccttactggtggctctcgtgctgcctgatatctgtgcccgctatcgcggcaaaccctgcggcgatgattaataccggacaattaagcgaaacgcaggaactcccctctttaaatggtcgcgtggcgcccgtagccagcaaagccgcccccggcacgctacagctgaatgaagcggttaaccgcgccgtgacctggcatccggccatcagtgaagccgtcggcaaactttatcagcagagcgaaaatgtggacgtcgccaaatcgaaatattatccgcaaattaacgccggcatggataacggctatagccacgacggtgacgataatggctttaccccttcgctggtgctttctctttcgcaaatgctttacgacttcggcaaagtcgcaagccaggtacgcgcggaaaacgcgggcgtcgcccagcagcaggccaacgtgctggtgagcatcgacaccatcgcccacgataccgccatcgccatggtgcaggtgcagacctggcagcagatggtcgagaccgccaaagaacagctggatgccctgtcctccatcggcaccctgacgaaacaacgtaatgatgaaggcgcaacgtcactctctgacgtggtgcagaccgacgcccgcatcgaaggggcgcgtgcgcagctgatgcagtatcaggccagcctcgacagctcgcgcgccacgctgatgagcctgctgggctgggacagcctgaacgcggtcagcaatgactttccgcagagcctggcccgcagctgcgacatcgccgagccggacgatcgtctggtgccctcggtattagcggcctgggcgcaggccaacgtcgcgcaggctaatctcgactatgccaacgcgcaaatgacccctaccgtttcgctggagccggaagttcgtcactacctgaacgaccgctacgccggcaacgaaacgcgggaccgcacccagtactccgcgtgggtaaaagtgcagatgccgctctatcagggcggcggcctcaccgcccggcgtaacgccgccggacacgcggtggaatccgcccagtccaccatccagcgcacccgtcttgaggtgcggcaaaaactgctggaagcgcgcagccaggtgatgagcctgatgagcacgcttcagatccagggccgtcaggaagcgctcagcgcccgcacccgcgagctgtatcagcagcagtatctcgatcttggttcccgcccgctgctcgacgtgctcaacgccgagcaggaggtgtttcaggcgcgctttacccaacagcaaaccgccggacagctgcatcagcttcagctcaactgtctgtacaacaccgggcgcctgcgtcacgcgttcgatcttgaaaaccgcaccatccagaccgtggagatccagccatgaagcaacgcgatattccgcagggtgaaaatatgacggatgaggcgctggagcagtgggcgcaggcgtttggctatgtggcgacgcgctatcgcgttgcctgctcgccaggctcgctgatcgccggcgcgccgtggctgaaaggcaaaccgatggtgcccgccctgacgcagctcgcccgtgaagccgggctgacattccagctgctgacggccgatcagcacgccatcaacagctggcgtctgccggtggtggtggagctgaacgacggtaaaatcggcgtgatcgacaatttcgacggcgaggatacgcttgaggtcagctttttcgacgacaacacgcacaccaaccgcctgtcaatgagcgcgatgctgcctgccatccgccacgtcatcgccctgcgtccgctggcggcgctgaaggacagccgcgtggatgcctatatctcaaaataccgcccggactggctctaccggctggtgatgcgcgaccttcgcccttacagctgggtaatgctggcggcactgttcattaacgtgctctccctctcgggcatcgtcttttccatgcaggtgtatgaccgggtgatccccgcccagtcctatccgacgctctatgtgctgaccatcggggtgctgatcgccacgctgtttggctttgtgctgcgcgtggcgcgcggacacattatggatctgctgggtaaacgctcggatctgcgcgtctcggatcgggtgttcggccacgcgctgcggctgcgccacagcgccattccgcgatccaccggcagctttatctcccagctgcgcgagctggagcagatccgcgagatggtcacctcctccaccatctccaccatcgtcgatctgccgttttttatcctgtttgtgattgtgctggcgatcatcgctccgcagctggcgtggatcgccccggtggcggcggtgatcatggtcctgcctggcctgctgctgcaaaagaagctggcggagctggcgaagcagtcggcgcatgaatcgaccctgcgcaacgcggtgctggtggagagcgtgcaggggctggaggacatcaagctgatgcaggcggagaaccgctttttgcagcagtggaacagctatatccagatcaccgccgaatccggcctgcgcacccgcgagctgacccagaacctgatcaactgggggatgaccattcagagcctggtgtatgccggggtgatcgtggtgggcgcgccgatggtgatcgacggcaccttaaccaccggttcagtggtggccgcctcaatgctcgcctcacggatgatcgccccgatggcgacgctgtgcggcgtgctggcccgctggcagcaggtgaaggcggccaaagaggggctggacagcattatgcagctgccgaccgagaatcagcgcgaagagacgccgatccgtcaggacgtgctgcgcggacattacctgttcgagcaggcgcagttccgctatcacccggaagatccgcgcatggcgctgcgcattaaccgtctggagatcaaagcgggcgagaaagtggcgatcctcgggcgcaacggcgcgggcaaatcaaccctgttgcaggcgatggcgggcgggatggatctggcgggcggtgaactgcggctcgacaacctcagcctgccgcatctggacgtggctgacgtgcggcgaaacgtcggctttatgacccagaacgcccggctgttttacggcaccctgcgcgagaacatcacgctcggcatgccgcgcgccaccgataaagagatcttcgaggtgctggagatgtgcggcgcggccagctttgtgcagaagctgccgaaggggctggattacccgattatggagaacggtgtcgggctgtccggcgggcagcggcagtccatcctgctggcacggatgctactgcgcgatccgaatatcgtgctgatggatgaaccgaccgcttcccttgatgagcataccgagcgggaatttattcagcgcctcggagcgtggcttggcaaccgcacgctgattgtcgcgacccaccgcgtgccggtgctggagctggtggagcgcgtggtggtactcaaagatggcatgctggtgatggacgcgccaaaagcccaggcgctgaacaacagccgtatgcagcaacagcagcaggcaaccggacgggagtggaaaaaatgaaaatcagtcagcgtgacgttgccgcagtagaagatctggataacgcgctcgactccgaaagcggttataccggtgcccggcgcattgttttcttctccctgctgatgtttgtggtgcttggcgtctgggcgtggttcggggtgctggatgaagtctcaaccggcaccgggaaagtgatccccagctcacgcgagcaggtattgcagtcgctggatgggggcatcctcaccgagctgaacgtgcacgaaggggatcaggtgcaggccggacaggtactggcgcgactggatcctacccgctcggaatccaacgtcggcgaaagcgcggcgcgttaccgggcatcgctggcctccagcgcgcgtctgtatgccgaggtgaacgatctgccgcttaaattcccgccgtccctggcgaaatggaccgacctgaccgccgctgaaacgcggctctacaactcgcgccgcgcccagcttgaggatacccagcgggagttgcgcgccgcgttagatctcgcgaacaaagagctggcgatcacccagcggctggtgaaaaccggggccgccagccacgtggaagtgctgcgcctgcaacggcagaaaagcgacctggagctgaagctcaccgacgtacgttcccagtattacgtgcaggcccgtgaagcgctgtcgaaggccaacgccgaggtggatatggtgtcagcgatcctgaaaggccgcgaggattccgttacccgtctgacggtgaagtctccggtnnnnnnnnnnnnnnnnnnnnnnnnnnnnnnnnnnnnnnnnnnnnnnnnnnnnnnnnnnnnnnnnnnnnnnnnnnnnnnnnnnnnnnnnnnnnnnnnnnnnnnnnnnnnnnnnnnnnnnnnnnnnnnnnnnnnnnnnnnnnnnnnnnnnnnnnnnnnnnnnnnnnnnnnnnnnnnnnnnnnnnnnnnnnnnnnnnnnnnnnnnnnnnnnnnnnnnnnnnnnnnnnnnnnnnnnnnnnnnnnnnnnnnnnnnnnnnnnnnnnnnnnnnnnnnnnnnnnnnnnnnnnnnnnnnnnnnnnnnnnnnnnnnnnnnnnnnnnnnnnnnnnnnnnnnnnnnnnnnnnncgtgaaaaacatcaaagtgacgacgattggcggtgtgatcccgcccaacggtgagctgatggaaattgtgccggtggacgaccacctgctgattgaaacccgcctctcgccgcgggatatcgcctttatccaccctaatcaggaggcgctggtgaaaatcaccgcctacgattacgcgatttacggtgggctacacggggtggtggagaccatttcgccggacactattcaggacgaagcgaagccggaggtgttctattaccgggtgtttatccgtaccagccaggattatctggtgaataaggcgggcaggcatttctcgatcgtgccggggatgatagcgacggtggatattaagaccggggagaaaacggtgctggattatatgatcaaaccgtttaaccgggcgaaggaggcgctgagggagcggtagtcaaacgccgggtggcggctgcgccttacccggcctacattctcgcaggcccgcgcaagcgcagcgccgccgggcattaatccgcacgcaagacgtggaatccgcctcgaagaattaacctttagtcatgcatcacacttcccttcagccatgaccagggtaatattactcgcagacaaaacgcacttgcgcacagtgcaggagtgcattactatccactcagcttcaaggactggagcttaccagcattatgattaatcattttcgggatcaatggcttgaggatttttttctctacgggagatcgagcaatgttattcctttgaatctggaaacagcgcttgcaagaaagctcgacatcatcaatgcggccatgtcgcacctggatttacgatcgccaccgggcaatatgtatgaagcattgagtcctccgttgaagggatattcctctatccgggtaaacagacaatacaggcttgtatttcgctggtcagagggaaaagcagacgatctctatctctctccacacaagtacacgcaacacaagtgaggcatcacctatgacacttcaacaggcactccgcaaacccaccacgccgggcgaggtgttgcagtatgagtatcttgaaccgctcaatctgaaaatcaacgatctggcagagatgctaaatgtacaccgcaataccgtaagcgcgttggtcaataacaatcgcaaacttactgccgatatggcgatcaaactggcaaaagcctttaataccactattgaattttggctgaacttacagctaaacgttgatatctgggaagcgcaatctaactcccgcacgcaggaggagttaagccggataaaaaccgttgcggaagtcatggcgaagcgaaaatccggcaagccagacgttaccctgcacgggaacagcgcataacggcatctgccattatgcgcatcctgttacagggaaattttgaggcgtcgaaccgcttctttaagctgctcatccgttggggtaacgaaagacatgcgcagcgtggtatggtccggctcgttgcagtagaagaactcacccggcacaaacacgacgccgttgctcaacgttttttccagccatttcgtcgtattgatgccgttgttcattttcgcccacaggaacatgccgccctttggcttgtggaacgacatcacatcgcccagctccgcttccagttccgttgcaaaggtctggtatttctggcgataggcttcgcggatcattttaatctgattcgccagacgaccggttttcagatactcgtacgtcatcagctgcgacagcgtgctggtgtgcagatcggtggtttgcttgaggttcaccaccgcgcgcttcagccactccggcaccagcacccagcccacgcgggtgcccggcgcgaggattttagagaaggtggaggtgtacacaacgttatcctcattgccgatatctttggcatgagcaatcagcgggcggaacgcttcgtcggtgtagttgatctcgctgtacgggtcgtcttcgataatcacgaagtcatagcgcttcgataattccaccagctgtttacgacgcgcttcggagagcgtcacgccgcccgggttaccaaaggttggcacgatataaaccgctttgatggttttggtggctaccagcgcttcaagttcatccactttcatgccgtcgccgtcggtgccaacggattcaaaattcgcctgcgccaggccaaagacctgcaacgcggcgaggtaggtaggccgctccacgacgaccgtatcgcccgggttaattaacgcccgcgccagcacgtcaagcgattgttgcgagccggaagtaatgaccacgtcatcggctttacaggcgatgccgcgaccttgacagatgcgttggatctcttcgcgcagccccgggacgccttccgtcaggccatactggaacgcttcgccaaaatgctgagacagcacggcatcagcagcgatttttaaaccctcatgatcgaacaggtccggatttggaataccgccacccagcgaaatcacgcctgccattttgctatgttttaataattcacggatggcagaggattgcaggccctgcgcgctgctggcgagtttgtttgcagacattctttacttaccttctttttttatattgtgcccaatcttagcagaatatgggcaataaattccgttagcttaggcagcggccgcaaatcctgacgccacagtaaatgcaccggcctcggcgcgggcgtaaacgcttccagaacccgaaccagcctgccgctcgccagctcttccgccaccagcacttccggttgcagcaggagtcccgccccggctcgcgccgccatgcgtaagccgtagccgtcattgcatcgtaagacggcatcacgcttccagcgcacttcgccttccactcccggcagccgccactcgttacgcgccgtccagaccgtgtgcgacaggcacaggtgatccaccagatcggctggcgtttgcggcgtaccgtgacgcgccagataatccggcgcggcgcagatcaccatgttgtagggacacagatatttcgccaccagatcctcattacggatctcaccgatacgaatggccagatcgaccccttcctctaccagatccaccattcggttggtgagatccagttcgatgcgcacttccgggtaacgctgcaaaaacgtggccgtcagaggcgcgataacgcagccgccaaacgaggtaggcgccgtcacgcgcagggtgccggcgggcgtggctcgcagacgctcaaccgcgttttcagcaatcgagacctgctccagcacgcgcctggcctcttcgaaataaacgcgtccggcatccgtcaggctctggcgacgggtgttgcgctccagcagccgcgtaccgagctgcgattccagctgcgcaatatacttcccgaccattaccgccgacatctccagccgggccgccgcgccggtaaagctgccgctttccaccaccgcgatgaacgtctccatgccgcgaagcttatccatattacgaacctctggttagtaatcttctaacatcatcccagtttatctgaatttttatttattaaagaatgaaggctcacaacataaggagtctgctatgaaaatcgtcattattggtgccagcggtatcgtcggtcgtgctgtgacagaagagctaagccgtcgccacgaggtgatccgcgtgggtcgcacgcagggcgatcatcaggtggatatcacctcgcaggcgagcgtgcaggcgctgttcaaaaagatcggtccggtggatgcgattgtctccgccagcggagggttgcacttcggcccgctctcaaccatgaccgacggcgagttcaaccagggtttgcaggataagctgctggggcaggttcgtctggcgctgaccggccagcactacctgaacgaaggtggctcgattacgctgataagcgggattgtggcgcacgagccgattgcccagggcgtgaatgccaccacggttaacgccgcgctggaagggtttgtgcgcgccgcggcctgtgaactgccgcgcggtattcgcattaatctgatcagcccgacggtgctgaccgaatccgccgaagcgtacgacggcttcttcccgggctttgaaagcgttcccgccgcgaccgttgcgcagacttaccgccgcagcgtggaaggggtgcagagcgggcgggtgtataaggtcggttattgaaccttacgggcggcgatcagcaccagcatcgggcgctctgcctcttctgccagcgcgggccaggcgtcaatttgcgcctgcgttggtccccactcattgacttcgcttattgttaatccggccttgatcagcgcgttaagcgtggtgcccagcgtacggtggtatttaatcaccccgtctgccagccagttgctgacgcgctggctttcgtcctgataatggttcacgccccagaaccgctcgccgctgttgtccgtcagccagccctgacgggaggcgcaggtgtaaatcgggtgctccattgagaagaccaggcaaccgccgggtttaagcgcgcgctgaacgtgggcaaataatgtgttcagttccggcagatagtgcagcgccagcgagctgtagaccagatcgaggctgttctcgttgagcttgagagactccagatcgctacgctgatagtgaatcagtggatcggcggtgagctccactgcgcgagcgagcatcttttcggagatatccacgcccgtgacgtcagacgcgcccagctcacgcgccgcgcggcagaaccaaccatagccgcagccgagatcgataaccgatttgccggttaaatccggcagcatcgccctgagcgcaggccactccggcgcgccgtccagcccctgcaccgagcgcggaagctgagcgtagccttcgaaaaacgccggattgtcgtagatgttttgtgccatggcagatccctctttaagaatgtgcatagcagtatactgcattgtcgggtggcggcttcgccttacccgacctacaaaatctccgaaccgtaggccgggtaagcgcagcgccacccggcaccacattaacccacagagccccagaccagattccccttatggaacgtcgcggtacgcggagagatgcgtgccacggcctcggcggaacaggaggcatccaccagcacaaagctggcgtcatcctgcgctttcggccacgcgcgctcgcctttgtcgttcagcggcagtacgtcgccggtggcgatgcccagcgcacgcgaaagcgtctgctcattcgggcgaatatagagctgtgcatagaggttggctttctccagcatgtcccccagaccgtacggcgaccagtggtcgatcacgctgtcggtaccggtcatgacaaacacgcctttatcacgcagctgcttcagcggcatgtgcagagtgccaatcggcacggtggaggcgatggtcacctgttgtgccgccatgcgggtggcgatctcatccacctcttgctcgttaagcgtcgccagggcgaaggcgtggctgatggtcagcttccccttcagcgccggcgttttctccacggtttcgaccatgtagttcaccgccgccacgcccgccgggctggtttcatgcaggtgaatgtccacccctttgtcataatccagcgcaatctggaacatggtgtcgagggatttctccatcgcgccgtcgacgttggtcgggtccagcccgcccacgtaatgcgcccccgcctgcatcgcctcgcgcatcagcttttcagaatgagacagcaacaggccgtgctgcgggaaggcaacgatttcgcagtcaaagcctgcgccccggcgcgccagtaccgcctgcaaattttccagatttttcaggccggaaaccggctctatgttgcagtggctgcgggcgatggtggaccctttggactggagcaggtcgatcagcttttcggcgcgttcttgcgtgtagggctgtaactccggcagcagcttctgctccaggcggatcatgccctgaatggtggtgcccgccggacggttcagggagcgccacgggccgccgtagaaggttttatccagatggatgtgcatgtcgcgcatcgccgggagcatcagctttttgcccgcgtcgaagtgcggcagggtcgcgtccgcgtggctgttgttgtcgcgcagggcgacgattttcccgtctttgatttccagcgttttcagctcggtgcgggtacttgtcgccacgctgccgtcgaagttaaacccggcttccagcagcacgttgtcgagatagtaatgttttgcggtgatgttcatcggtttacccgtctcgcaggttgcctttgctgaatcggcagcatacgcgacggaacccgtggcgccaaacagcgcgcaggcggtaaccattttgccgctctggctgataaactcgcggcggcttttattctcactcatcttatcttccttcattaacaatgtgggtacccgtttcaccgcgcagcgccgcgggcaggcagtccggcgaggtaatgatcacccgcctgccgccatggcgtaaaaattccagcgaggcgacgattttcggcaacatgctgcccgccggaaaatgcccttcttccatgtagcgcgtcatctgcgccacgttcacagtgctcagcgcctgttgattcggcttgccgaagtggatgcacactttctccacgccggtggtgatcaccagcacgtcggcgcggatctcgcgcgccagcagcgcggtggagagatctttatctatcaccgcgtccacgctctggtaatcgccctgttcactgcgcaccacaggaatgcctccgccgcccgcgccgatcaccacaaatcctttctgcgtcagcgccttgatggcatccgactcaacgatgcgccgcggctgcggtgaagccaccacgcggcgatagccccggcctgaatcctcaacaaaatgccagtccgggtgcgcaagttgcagttcgtcgcgctgcgcctcgctgaaaaacgcgccgatgggtttcgtcgggtgcgtaaaaccaggatcgtttttatccacctccacctgggtgacgaccgtgaccgctttttgtttcccgcgcgccgccaggcggttgttgagcgcctgctggatcaggtagccgatcccgccctgggtatccgccacgcagtttgccagcggggtcagcggcagtccttcccgctcgtgggcgatttcggcgcggcgcagatccagccccacctgcgggccattgccgtgggtgagcacgatgtcatagtccgaagccagcatttcgagcaccgactcagccaccgctttgaccgcctgcgcctgatgctcaatcgactggctggcgttgtctttgataatgctgttgccgccgatggcgacgaccataagctctttcattttgtttcctttagaaggtgcgttctggtgccctcatcccggccctctcccacagggagagggggattaacagaggtatccagcacatgcttcaccacaaacatcccgcccatcatcaggtaggccgtgacgaacatcagggaactgccctcggcaaagcccaccaccggcgcgtggatcaccccaaacagcgccagcagcgctccaccggccgccgcgacggctccacgcagcggtttgttgaggatggcgaagatggcgatacagccccagagcatgctggcgagcggcgcgccgttgccgagatgcatcaggccttcgtagtagatccccttgctgtgcagcacgtcggtgccgattttcgccgcgctggtccccgccgcgctcatcacgctgttcatcatggtcagcgcccagttggcgatccacgggaacaggcagatgaagatgacgggtacctccactttcggggtttccctcaccacctggttggcggtgacgacgccgataaacaccagaatcggcacgatggcggtcatcggtatgatggcgagcataaaggcccccagcccgaacagcggcacgatgaacatggtcacgccggacgccagggtgtagccgatgctggcgcccatcgctttccagccaggatggccgacgtagaccgtgaccgggaacggattgcccatcaggcagccgagcatcgaggccagaccgttcgccagcattaccttgcgggtcgggtattcatcccccgccgcgtgggcgctttcgatgttctccaggtcaaagatgtagttcgccagccccagcggtacggcggacgccagatacggcagcgcgtgcggcagtccttgcatgaagctgtccacgtgcacttctggcgggttaaagccgaatgatgacatggacgctttaatggcatccgggctttgcaggccggagatccacgcaagcagagtaccggcaattaacagcagcaggccggtcgggattttggcaaaaatcggctttttaccgaaccagttaatgaagatcagcagcaggacgataaacgacacggtcggcgcttcgaacgcctgcaacatcgggttcatcgccagcagcagcaggccaagaccggacaggcacgacagcagcacggtacgcgggatcatcttgcggatggtttcccccaggaaggaaccgcccgcgaggatcatcgcttccacaaagcaccacaccaggccaatctgaatcgcgaaatccgcatcgccggtttgctggtaaaccggcattaagaccaggaaggtcacggtaaaaatcgacggcgcgcttgggccggacggcagcgcggtgacgtccgttcgtccggtggcgcgcgccatttgcaggccaaaccacgtatagcaaagactcgccaccagcaccgccagcccgaaggctggcgcgatgcgtccataaacaatctccttcgggatgccgacgacaaaaatgagcagccccatcatggtcagcaaattggtcaggttgttggtcatcaacccgaaataagctgcccagtcacctcttttccactccagtttcatgtttttcatggatgcataccttatagaacgtagcgatcgcggaaggttaacagcgccttttcaaaacagctaaacggcgggtgaacgatgcccgccccaatcatgccgatcccggcgtccttgtgggcaatggcggtattaatgaccggcagaatgccgctgcccgcgaccttcgtgatgtcgatggcggtcgggatgcccataaaagacagcagcggaatggtgacgttcgggttttcgccgagggtgatttcgcgcatctggcgagaaaaatcgatggcttcctccaccgtgccgcccaccagcgcaacgatggccggggccgtcgccattgcaaagccgccgatgccgtaggtttcggtaatcgcgctgtcgccgatatccagcccggagtcttccggcttatagcccgcgaacatcgggccgatcacctgctgcgccgggccggtgaaccactgccccggcaggccggaaacgcgcaggccgaactcgtagccgttgcgcgccatggtggtgacgacggtgctgtactcaatgccgtgggcggcatccagcgcggccttacacatcgccatccacgtcggaccggagaagtagtcgctgctggcgacaaactcgaacacttcacgctgctgcgccaccggatagcccgcctggatcagccccggcgtcagcgcctgaataagcagcgtggtgcccgcgttgttgcggttgtggcactcgtcgcccatgtgcagcgcctgggccagcatcaggcgcaggtcgatttcgccgataatcttcatcgcgtcgcgcagcatcgggccgagcacgtcgcgcatccagttcaggcgctcgatcacgctctggtcgttagcccccatgcgcaggatcttcgccatctgctcgctgaggttggtgaaggcgcggttgccgtaggttttgttctcaacgatgtgcataaacatcgacgcggaggtgacgcccgccatcgagcccacgcagtcgtgctcgtggcaaggcgagaacgtaatatctccggaggcggcgatccttgccgcatcgtccagatctttcgccagcccttcaaacaccagcgcgccggtaaccgcgcctttcattgccccgcacatgttctcccaggagacgggcggaccggcgtgcagaatggtggtgcgggtcatgcccggcaccacgttgatcgcctggtcatagcccaccagcaccggatgggactgaataatccgctcaagggcaattttgttcgcggcggcaattttctccgccagcggtttttccgccagccgatccagcgcgtccaccacctgcatattgccctgccccggcggcgtccagtcgagctgggtcacgggaacgtgctgttttttgaggtcgtcgctgaacatcgcaatcccgacgttaatcacgttcagcggctggttgaataagatcgtcattatgctctctcccctttgcagacaaattcgcgtgccagtaatccggtattggtgctgctgctggcccagatgacgcctgcatcagtcagcagctggcactgctgcgccaacgactgcggatcctgatcggtgccgagcacgtagccgagaatttccagcggacggttgtcggctttcgcgatcgcctgtgcctctttgatcgcctcgatcatcaccccaaccggatcgtcatgcgcgccaaagccaagcacgaaatccatcacgatcacccccacctgcggatcgcgcgcctcctgtagcaggcggctgatgcggttggtcgggtcgatcatcgggtgtggcttgccgttggtgaagtcgtcgtcaccgaaatcaaggaaggtgtgggcctggctgacgctgatgtctttcagacgcctggccggatccggctggatgttgctgtaaacattgtcaaatttctccagcacggcaaacatcgcttcgtcgcacagggtgccgccgcagaacaggccgcgaatgtacttctgctgcggcgtcaggcgggcgcgtacctcttcgatcagcggccagttgagcggatgtaaatccaggtcgtcttttttaatgccggtaagcagcaccgctttcagggccgcctctttggtgccacgagcaaactgcaaaccgtcttcatcggctggcggttcgttgcggcccaggaagcacacaaccacaggcttgcggcaggcgcgtgcccgggccagtactttctcagccaccgcgggtgcaggcggtttggagatgagcgctatcacccgggtcgcgtcgtccgcctccagcatgtcgatagcatcgagcatcatcaggccgccgatcttctcgctgagatcgcgtccgccggtgccaatcagctgcgacacgccgccgccgaactcgtgaatgcgcacgctcagctcctggctgccggtgccggaggcgccaacgatgccaatctgcccgcgacgcaccgcgttggcgaagcacagccccgcgccgttgataatggcggtgccgcagtctggccccatcatcagcagacccttttcatgcgccagctgcttcagcgccagctcgtcgtcgagcgatacgttatcggagaacagcatcacgttaagatcgttttccagcgcctggcgcgcttcccgcgcggcgaaggtgccgttgacggaaatcaccgcaaggttgctgtccggacgatgggttttggcgctggcaatcgtcgcgtagcgtgcttcatgggagccagtgcgctctttacgcgtgaataacgcttcaatggcggccagggtttcctcattcgccgcgtcgcctttaataacgatcatcaggtcgccgtttttcgcgtccgctaattccggcgttaatagcccgaggttttttaatacccctttgttcatttccgtcgccatcgccacaaacgcctgctcgacgcccggcaatttattggctttggtggaaaccgacattaaggaaaccgaatcgaaatacgtattcttttttatgacgattttggttggcattattttcacctgtttaagataaaagggggccgccgtcgtgctaaatgcacgtcggtaacaatgcgtttattgattaacggccagccaggggaaggctgaccgaatgcactatgcgcctgccgccagcagcaggtctgcgatcgcgttgaagcctttttcccgcgccagctcgagcggggttttgccgtatttatcggtcatgtgcgggttcgcgccgtgatcgagcagcagcttcacaatttcctgctgctttgcgccgccgtcgtttaatacgatggcctccagcagcggcgtccagccgacaaaattggtgtggttgacgttgatgtcggttttttccagcagctcacgcacgatttcaacgtgccctttttcactggcaggggtaatgcccacgccgccaaagcgcgtcagacgatcgagatccggatttgccggaaggacaatgcgcagcagggttaaatcattggtcaggcagccgatcaggaaggggttaaaacaggtctggtcctgtttatcaatatccgccccggcggcaattaaaaactccacacaggcgtaatgctttttcaggctggcaataataatggcggttcttttctggcggttggtcgcgttaatatccacgcctttctccaggcaggcttttagcgcgtcgatattgccctcttctgccgccagcagaaattctgtaaccagtgcagttgcagacatattcagactccctatgtttcacttctgatgacctgagaatagcaacagcctggtcataaaagaatccgcttaaaaatgattcatcgacacgcaattcattgttgagttaaattcaacagtccgggagaaatgtgcgtctgtgcaacctttttcttatgttttaccgcttttatgcgcttcaggctgcattatccttatggctgaaaagccttacacagcgcggttctacgtaaaaatccagaactgtgatcgacatcaactatgatgtaacgccgctgttaaaatatgttcaaaactgatggtcaccaggagccataatatgaattccatctttaccgaagagaatttgctggccttcaccaccgcggcacgttttggcagttttagcaaagcggctgccgagctgggcgtgaccacctccgccatcagttacaccatcaaacgcatggagaccggactggacgtggtgctgtttgtacgtaacacgcgcagcattgagctgaccgaatccggtttttatttttatcgtaaagcgaccgacctgctgaatgactttcatgccatcaagcgcgggattgataccatttctcagggcattgagacgcgggtgcgcatctgcataaaccagcttttgtatacgccacgccataccgcgcgtttgctccaggtgctgaaaaaacagtttcccacctgccagatcacggtgacgaccgaggtgtataacggcgtctgggattccatcattaataatcaggccaatatcgccattggcgcgccggatacgctgctggacggcggcggcattgattacaccgagataggggcgatccgctgggtatttgccatcgcgcccacgcatccgctggcgttcgccccggagcccatttccgaaagtcagctgcgtctgtatcccaatatcatggtcgaggacaccgcgcataccatcaacaagaaggtgggctggctgcttcacggtcaggaggcgattctggtgccggacttcaacacgaaatgccagtgtcagatcctgggggaaggtattggctttttaccggaatatatgacgcgtgaggcggtggaggacgggctgctggtaacgcggcggatcaataatccacgtcaggattcgcgcatgctgctcgccacgcagcatgcggcgaccggtcaggtcacgcgctggatcaaacagcagtttggccccgaaggcgtgctgacccggatctacagtgacttactgtggcgtacctagctcttcgtctgaacccaaaacgcgtggataagaccggggaagtagcccaggatggtcagaaggatattcagaataaacgcccagcccagccccttgccaagcagcacgcccagcggcgggagaataatcgtaaaaacaacgcgccaaaaacccataaaaaactccgtgcaagctaaccaattgaaaattataaaagacacttctctaagcgtagccagtttacggttaactgccatgcgtctctcgcgcttttacctgcctttaccctctttacactggcttaaacccccgccttaaatgctctactgttctgaaattgaccgtaaggaaacgcaatgtctcttcctcttatttcgccgcagcaggcaaacgcgctgattgctgaaagtgatgccgtggaaccgacgtacctgataaggagtatctgaaagattaggctgtaccccgcccccggacgtgggctatggtgaagatcatgacaatgatgaggaggtgctatgttttctgtcggtgattatgtccaaccgcgtcagggcggtccgaaactgaaagtgctcgaagtgaatggtgaaaacattgtggctgtgcaggccagcaatgagcagggcgagaaatatcacctgaaagcggcggacgtggttctgtactccgaagacggtgactttggcgtctgctaagtcaataatcgggcggaatacaccgcccgaataatcatcagatcaggaaatcgtccagcgatttaccgtttgccagtgcggttgcaattggctttggcgtacgcccctggccggtccaggttttttcttcaccgttcgcgtcagtaaaacgatatttcgccgcacgcgctttacgttttttcgtcggctgacccgcctgcgccagatcactgcctaacagatcgctcggagaaataccgtcagctttcatcagttccagcagagcattaattttatcctgctgttcagcgcgttgacgctctaattcagcctgctcgctgcgtttttcttcagtgacaatccggaatttttccagcacttcttccagaacatccatggataattcacgtgccagcgcccggagggtacgaatattattaagattctgtaacgttaaagccataataatgaaaaacctttcttcgtgtgtataacataaatcaggcaacagaataattgatttttgttctgatatctacccaccctgacgttttgacattattgtaaatgttttagaatatcccgttaatataaccccgaaatatatgtctgttttaatgcgtaatataccgcccttccccaggccaaaaacccctgtttaaaacagttcaaaaaaccgcctccactctcccatacaacagaggttttacacgcgcactgataaactaatccattgatttattttaataaaatatagacagggagagaaaataacgaagcgcgcaaaaaacgcacaactttagagaattttatggccaaagcgcctgcaaataaaaattaatcactacttgttagttaaaagccagagagatacgctatacactcatagcaaaccaacctaaagcactaagggccgcaggtaaaacgccacttttttgtcctgttcgaggagttcagacatgttctcaccgcagtctcgcctgcgccatgcggtagcggatacgttcgcgatggtcgtttactgttccgtcgtgaatatgctgattgaaattttcctgtcgggaatgtcctttgagcaatccctctcgtcgcgcctggtggccattccggtgaatatcatgattgcctggccgtacggcctgtatcgcgatgcagtgatgcgtttagcccggcgtattagcccggcgggttgggtaaaaaacctggcggacgtgctggcttacgtaacgttccagtccccggtgtatgtggttattttgctgacggtgggcgcagactggcatcaaatcgccgctgcggtaagttcaaatatcgtggtatccatgctgatgggtgcggtgtacggttactttcttgactactgccgccgcctgtttaaagtcagcccttatagccaggcaaaagcgtaaggtaaggcgactggctcaggccagtcgcagagttattgtacgtcgccaaacagccctttcaggaaccgctccagcgccatacgcgagctgaaaccgtgcggaataccataatgttcatgcgtctcgccgcctaaatagagcggaaattgctgataatgatcgcaggttttaatatccgaggcgggctcagcaaatgacaggcttctgtctttgagtgtcgggtgaataatgagagcagtacgccccattcttgcttcacggttgacgtaaacataattctcaccacggcgatatccgtacgcttttgatgttacctcatccatggtgaacccttctttttcaagaacgcgcgccacctcatcgggtcgtaaatacatatcttttcctcattatcattcctgcccggcaaccttacagtattcagcattagcagggctttcagaatattccataaactgcccgataagccgtgactcgcttcagatattacatttctggactaaactaaacgggaacacaaattatggaggatcgtatgtttaacagaccgaaccgaaacgatattaatgacgacacacaggatattcgtaacgatgtcagccaattagcggacacgctggaagccgtattgaaatcctggggctctgacgcgaaggacgaagcagatgccgcgaaacgtaaggctcagtctctgctgcgtgaaacgcgggcaaggatgaatggccgctcacgtaccactcaggcggcctgcgacatggccagctgcgccaccaccttcgtacgtgaaaaaccactttgtacgctgggaacggtcgcggcggtcgggatttttgtcggcgccctacttagcctgcgtaagtaagcgcgcgttctcagccccggtcgcctcaggcgccggggcttttctttgcctgacagcctgaaaaacccgcacagcccaccctgccccgccaggctcatcgttggggccttattaatctgtatttcccatatcttgtgtggttgaaacttatcgcaactacatctagtattccctttagcaagacacacacaacatgacgcgtttactcgcgccgttctctcattctaaatggaaatacgaatcatgagcattattatttacactcgtaacgattgtgttcagtgccacgccacgaaacgggcgatggagagccgcggcgtggcatttgagatggtcaatattgatcaggtgcccgacgcggcagacaccctgcgggcgcaggggtttcgtcagcttccggttgtcgttgccggcgacaccagctggtctggcttccgtccggacatgatcaaccgccttgccgctcagggcgtcagtgcatgagcacgctggtctacttttccagcagctcggaaaacacgcttcggtttatggagcgtctcgggctgcccgcgatacgcattccgctgaacgagcgggagcgtattcaggtagacgaaccctacattctggtggtgcccagctatggcggtggcggcaccgcaggggctgtgcctcgtcaggtgatccgctttctgaacgatccccataaccggcagctgattcgcggcgtgatcgccgcaggcaatcgcaacttcggcgaggcctttgcccgcgccggggatgtcatctctcaaaaatgcggcgtgccgtatctctatcgttttgaactgatggggacacagcaggacgtagagaacgtgcgtaaaggagtgaacgaattttggcaacgacaaccgcagaacgcgtgattcaggcgacgccggattaccacgcattaaacgccatgctaaacctctatgaccgcgaggggcgcattcagtttggcaaagatcatgaggcggtggacgccttttttgccgctcatgtacgcccgaacagcgtcgtctttggcagccagcaggaacgtctcgactggctggtaaaagagggttattacgaagagcgtgtcctgacacgctacgaccgcgccttcgtggtggcattgtttgaacgggcgcacgccagcggttttcgcttccagacgtttctcggcgcgtggaagtattacaccagctacaccctgaaaacctttgacggcaaacgctatttagaaagctttgaagatcgggtggtgatggtggcgctgacgctggcgcagggcgatgaagcgctagccgaaagactcacgaaggagatcctctccggtcgcttccagcccgccacgccaacgttccttaactgtgggaaagcccagcgcggcgaactggtctcctgcttcctgctgcgtattgaagacaatatggagtcgattggccgtgcggtgaattcggcgctacagctttcgaaacgcggcggcggcgtggcgtttctgctttcgaacctgcgggaagcgggcgcgccgattaagcgcatcgaaaaccagtcttccggcgtcatcccggtgatgaagatgctggaagatgccttctcatacgccaaccagcttggcgcacgtcagggcgcgggtgcggtttatctgcacgcgcaccacccggacattctgcgttttctggataccaaacgtgaaaacgccgacgaaaagatccgcatcaaaaccctgtcgctcggcgtggtgatcccggatatcacgtttaagctggctaaagagaatgccgacatggcgctcttctcaccgtatgacgttgagcggatttacggcaaagcctttggcgacgtggcgataagcgagctgtacgacgagctggtggccgacgatcgcattcgcaaaaaaaccatcaacgcccgcgatttcttccagacgctggctgaaattcagtttgagtccggctatccgtacatcatgtacgaggacacggtgaaccgcgctaacccgattgccgggcgcatcaacatgagcaatctgtgctcggagattttgcaggtcaacagcgcgtccagctacgacgaaaacctcgactacgcggacgtgggcaaggatatctcctgtaacctcgggtcgctgaatattgcccataccatggattcacccgattttggccgcacggtagagaccgccattcgcgggctgacggcggtatcggacatgagccacatccgcagcgtaccgtccattgaggcgggcaacgctgcgtcgcatgccatcggccttgggcagatgaacctgcacggctatctggcgcgggagggcatcgcctacggcagcccggaagggctggatttcaccaacctttatttctacaccatcacctggcatgcgctgcatacctcgatgatgctggcgcgcgaacgccaccagcggttcgcaggctttgagcagtcccgctacgccagcggagagtatttcagccagtatctggaaggcgactggcagccgaaaaccgaaaaagtacgcgcgctgtttgcccgcgctggcatcaccctgccgacgcgtgagatgtggcaacagctgcgtgaagaggtgatgcgctacggcatttataaccagaaccttcaggcggtgccgccaaccggctccatttcctatatcaatcacgccacgtcgagcatccaccccatcgtgtcgaagattgaaatccgtaaggaaggcaaaaccgggcgtgtctactaccctgccccgtttatgaccaacgagaatctggcgctgtaccaggacgcctatgagattggcccggaaaagatcattgatacctacgccgaggcgactaaacatgtggatcaggggctgtcactgacgctcttcttcccggacaccgccaccacgcgggatatcaacaaagcgcagatctacgcgtggaagaaaggcatcaaaacgctgtactacattcgcctgcgccagctcgcgctggaaggcaccgaaattgaaggctgcgtgtcctgcgcgctgtaaggagaaaggatgaaactgtcacgcgtaagtgccgttaactggaacaaaattcaggatgataaagacctggaggtctggaaccgcctgaccagcaacttctggctgccggaaaaggtcccgctctccaacgatattccggcctggcaaaccctgagccatgccgagcagcagctgacaatccgcgtctttaccggcctgacgctgctggacaccattcagaataccgtgggtgcgcccgcgctgatgagtgatgcgctgaccccgcacgaagaggcggtaatgtcgaatatcagctttatggaggcggtccatgcccgctcctacagctcggttttctccaccctgtgccagaccagagacgtggacgcggcctacgcctggagtgaagagagcgcgtcattgcagcgcaaggcagatctggtgctggaatattaccgggccgacgagccgctgaagaagaagatcgccagcgtgttcctggaatctttcctcttctattccggcttctggctgcctatgtactggtcgagccggggcaagctcaccaacaccgccgatttgattcgcctcatcatccgggatgaagcggtacacgggtattacatcggctataagtatcagaaagggctggagaaagtcagcgcggaaaaacgcgaggaactcaaaggttttgccctcgatttactgatggatctgtatgacaacgagctgagctataccgaagagctgtacgccggaacgggctgggaagaggacgtaaaagctttcctctgctataacgccaacaaggcgctgatgaacctgggctacgaagcgttattcccaccagaaatggcggaggtgaacccggcgatcctcgcggcgctgtcgcccaacgccgatgaaaaccacgacttcttttccgggtccggctcgtcgtacgtgatgggtaaagcggtggaaacgcaagacgaggactgggatttttaatgaatgacttaacgttcattaattaactctgcatttcattatttccagccgaatattccacgacgtactacactgtaatttccccgtcatattcgcctgaatcacaccgattcaggcgaaattctcccatgcaacagcaaaaaattgagaaaaattcaaaccgccctcagccctttattcatgggaaattcagccatttcgcttgcggcaaaattccggcctcaggccggtccagggttgtctcagattctgagtatgttagggtaatgccagttaactatttaccatggtaatcatatcgacataaacaaataacaggacactctctattgcatggcaattaaattagaagtgaaaaatctttataaagtatttggcgagcacccgcagcgcgcattcaaatatattgagaaaggccttacgaaagagcaaattctggaaaaaaccgggctatcgcttggcgttaaagacgccagtctggccattgaagaaggcgagatttttgtcatcatgggattatccggttcgggtaaatccactatggttcgccttctcaatcgcctgattgaacccacccgcggacaggtgctgatagacggcgtggatatcgccagaatatcagacgcagatctccgtgaggtgcgcagaaagaaaattgcgatggtgtttcagtcatttgcactgatgccgcacatgacggtactcgataataccgcctttggcatggagttagccggcacgcccgctcaggaacgtcaggaaaaagcccttgatgcactgcgtcaggtcgggctggaaaattatgctcatgcgtatccggatgaactctccggcggtatgcgtcagcgtgtgggattagcgcgtgcattagcgattaatccggacattttattaatggacgaagccttctcggcgctcgatcccttaattcgcaccgagatgcaggatgagctggtaaaattacaggccaaacatcagcgcaccattgtttttatttctcacgatctggatgaagccatgcgtattggcgaccgtatcgccattatgcaaaatggtgaagtggtgcaggtcggcacaccggatgaaattctcaataatccggcgaatgattatgtgcgcaccttcttccgcggcgtggatattagccacgtattcagtgcgaaagatattgcccgtcgaacaccaaacggcattattcgtaaaacgccaggttttggcccgcgctccgcgctgaagctgttgcaggacgaagaccgtgaatacggttatctggttgaacgcggcaataaatttgtcggcgtggtctccatcgactctctaaaaaccgccctgagcgaaaaccagggaatcgatgcggcgttgattgacgctccgcttgccgtggacgccgaaacgccgctcagcgagttgctctctcacgtgggtcaggcgccgtgcgccgtgccggtcgtcggtgaagaacaacagtacgttggcatcatctcaaaacggatgctgctacaggctttagatcgcgaggggacaaacaatggctgatcaatcaaacccatggggcaccactgaagcagcggacagcgcggcgcaatctgccgatgcgtgggggtcgacgcctgcgcctgccgatggcggcggcgcggcagactggctcaacagcgcaccagcgcctgccccagagcatttcaatattatggatccgttccacaagacgctgatcccgctggatagctgggtaacggaggggatcgactgggtcgttacccacttccgtccggtgttccaggggatccgcatcccggtggattacatcctgaacggcttccagcagctgatgctgggcatgcccgcgccggtggcgattatcctgttctcgctgatcgcatggcagttcggcagcgcgggtatggggatcgccacgctcatctccctgattgccatcggcgcgattggcgcgtggtctcaggcgatgatcaccctggcgctggtgctgaccgccctgctgttctgcgtggtgatcggcctgccgatggggatctggctggcgcgcagccccagggccgcgaagattatccgcccgctgctggatgcgatgcagaccacgccagcgttcgtttacctggtgcctatcgtgatgctgttcggcatcggtaacgtaccgggggtggtcgtgaccattatcttcgccctgccaccgattattcgcctgactattctgggcattaaccaggtgcctgcggatctgatagaggcatcgcgctcgttcggcgccagcccgcgtcagatgctgtttaaggttcagcttccgctggcgatgccgaccattatggcaggtgttaaccagacgctgatgctggcgctgtcgatggtggtgatcgcctcgatgattgccgttggcgggttaggtcagatggtactgcgcggcattggccgtctcgatatggggctggcgaccgtcggcggcgtcgggattgtgatcctcgccatcattcttgaccgcctgacccaggctgtcggtcgtgattcacgtagtcgcggcaaccgtcgctggtacaccaccggccctgtcgggttactcacccgcccatttacaaaataaggaacaacgatgcgacataacgtactttttgccacagcgtttgcgacccttgtctccaccagcgcagttgccgctgacctgccgggcaaaggcattaccgtgcagccggtgcagagcaccatttcggaagagtccttccagacccagattgtcagccgtgcgctggagaaactgggctatacggtgaataccgccagcgaagtggattacaacgtgggctatacctccattgcctccggtgatgccacctttaccgccgtgaactggcagccgctgcacgacgacatgtatgccgccgcaggcggtgacaagaaattctaccgcgaaggcacctttgtgaccggcgctgcgcagggatatctgatcgacaagaaaaccgccgataaatatcacatcaccaatattgaacagctgaaagatccgaagatcgcaaaactgtttgataccaacggtgacggtaaagccgacatgatgggctgttcgccgggctggggctgtgaagcggtgattaaccaccagaacaaagccttcgatctggcgaagaccgtcgacgtgagccacggcaattactctgcgatgatggccgacaccatcgcccgctttaaagaaggcaagccggtgatctactacacctggacgccgtactgggtgagcgacgtgctgaagccgggcaaagacgtggtgtggttgcaggtgcccttctcctccctgccaggcgagcagaaagatatcgacaccaaactgccaaacggcatgaactatggcttcccggtgaacaccatgcatattgtggcgaacaaagcctgggccgagaaaaacccggcggcggcgaagctgttctcggtgatgatactgccgctggcagacattaacgcccagaacgcgatgatgcacgcgggtaaatcatccgaagctgatatcaaaggccacgtggatggctggatcaaagcccaccagcagcagttcgatggctgggtgaaagaggcgcttgaggcgcagaagtaaaaaacacaacccttacccctcaccctaaccctctccccgaaaggggagagggccggggtgaggggcttaaccgcacaatccaccacgtaacaattccccaacattcaccatcattggttattatgtttccggaaaaataatcacttaactcacgattcctgaaactaatgacaaaaacaactcaagggcttagccccgcactcatccttttaatgtccgtggcaacgggtctggccgtcgccagcaactattacgcacaaccactgctcgacaccatcgcacgcgccttcgatctttcagccagctccgccgggtttattgtcaccgccgcacagctcggctatgcggccgggctgctgttcctggtgccattaggcgatatgtttgagcgccggatgcttatcgtctccatgacactgctggcggcgggcgggatgttgatcaccgccagcagccagtcgttaacgatgatgattatcggcaccgcgctgacggggctgttctcggtggtggcgcaaattctggttcccctcgccgcgacgctggcttccccggaaaaacgcggcaaagtggtcggcactatcatgagcggcctgctgctgggcatcctgctggcgcgaaccgttgccgggctgctggcgagcctcggcggctggcgcaccgtttactgggtggcgagcgtgctgatggttatcatggcgctggccctgtggcgcggcctgccaaaggtgaagcaggaaaatcacctgaactatccgcagctcctcgcctccgttttcagcctctttacccgggataaactcctgcgcacgcgcgccattctggggtgtctcaccttcgctaacttcagcatcttatggacgtcgatggcgtttctgctcgccgcgccgccgtttaactactcagaaggcgtgattggcctgttcgggctggcaggcgcggctggcgcactgggcgcgcgcccggcgggtgggctggccgacaaaggcaaatctcatatgaccacctccgcagggctggttttactcctgctctcctgggcggccatctggtacggacacgtctctgtgctggcgctgattgtcggtattctggtgctcgacctcaccgtgcagggtgtacatatcaccaaccagaccgtgatttaccgcgtgaagccggatgcccgtaaccgtctgacggccgggtacatgaccagctactttatcggcggcgcggcgggctcgctcatctcagcctccgcctggcagcatgcgggctggacgggcgtgtgcgccatcggcgccatcgtcgcggcgataaatctgctggtatggtggcgcggctatcaccgtcaggaagcaattcactaagttttacattgctttgggccccctggggtgtaaagggggcctgcatctgttaaggtaacggtaatcatttatcccagaaattttactgtgggtgacatatttactaccggcatgaatagttcagacccctgtcctcacatcccctctttcgcgggtacacaccccacgctctctgtgctcaccgggtcacggatttacccggcgctttctgatggtgacatacgtttggcggatataaccgcacaaataattcatttacattatttgtcactgtcgttactatatcggctgtaattaatgaggttatgcccaaaatggatagttcgtttacgcccattgaacaaatgcttaagttccgcgccagtcgtcatgaggacttcccgtatcaggaaatcctgctgacccgcctgtgcatgcacatgcagggtaagctgctggaaaatcgtaacaagatgctgaaagcgcaggggattaacgagacgttgtttatggcgttgattacgctggagtctcaggaaaatcacagcattcagccgtcggaactgagctgtgcgctggggtcatcccgtaccaatgcgacccgtatcgcggatgaactggaaaagcgcggctggattgaacgccgtgaaagcgataacgatcgccgctgcctgcatctgcaactgaccgagaaaggtcacgaattcttgcgcgaagtgctgccaccgcagcacaactgcctgcaccagctctggtctgccctcagcaccgccgagcgcgaccagcttgagcacattactcgcaagctgctcacccgtctggaccagatggatgaagacggcgtcatccttgaggcgctgcgctaacgcgacgatccgctcaacattccagattgctaaaaagaaaaactgacaggccagcacgtgaaactgctggcctttctgacaacaggtcggctcagccgatgtgaaaataaaaagatcgtggagaacaacaatgagcgcaaatgcggagaacaccctcccgcagcaaccggccaacaaaaagggcaaacgtaagagcgcccttattctgctgaccttgctctttattattattgccgtggcatatnnnnnnnnnnnnnnnnnnnnnnnnnnnnnnnnnnnnnnnnnnnnnnnnnnnnnnnnnnnnnnnnnnnnnnnnnnnnnnnnnnnnnnnnnnnnnnnnnnnnnnnnnnnnnnnnnnnnnnnnnnnnnnnnnnnnnnnnnnnnnnnnnnnnnnnnnnnnnnnnnnnnnnnnnnnnnnnnnnnnnnnnnnnnnnnnnnnnnnnnnnnnnnnnnnnnnnnnnnnnnnnnnnnnnnnnnnnnnnnnnnnnnnnnnnnnnnnnnnnnnnnnnnnnnnnnnnnnnnnnnnnnnnnnnnnnnnnnnnnnnnnnnnnnnnnnnnnnnnnnnnnnnnnnnnnnnnnnnnnnnnnnnnnnnnnnnnnnnnnnnnnnnnnnnnnnnnnnnnnnnnnnnnnnnnnnnnnnnnnnnnnnnnnnnnnnnnnnnnnnnnnnnnnnnnnnnnnnnnnnnnnnnnnnnnnnnnnnnnnnnnnnnnnnnnnnnnnnnnnnnnnnnnnnnnnnnnnnnnnnncgtcatgttgaagagacagacgatgcatacgtggcagggaatcaggttcaaatcatggcccaggtgtcaggcagcgtgacgaaagtctgggctgataacaccgactttgtgaaaaaaggcgatgtgctggtcacgctcgacccgaccgacgcccaacaggcgtttgaaaaagcacagacggcgctggcctccagcgttcgccagacccgccagctgatgatcaacagcaagcagcttcaggccaatatcgacgtgcagaaaacggccctggctcaggcgcagagcgacctcaatcgtcgtgttcctctcggcaccgccaacctgattggccgtgaagagttgcagcacgcccgcgacgcggtggccagcgcacaggcgcaactggacgtggcgatccaacagtacaacgctaatcaggcgatggtgctgggtacctctctggaaaaccagccagcggtgaaacaggcggcgaccgaagtgcgtaacgcatggcttgccctgcaacgtaccaaaatcgtcagcccgatgaccggctacgtttcccgtcgttccgtacagccaggggcgcagattagcaccaccacgccgctgatggcggtcgttccggcaaacaatctgtgggtcgatgcgaacttcaaagagacccagctggcgcatatgcgtatcggccagaccgcgaccgtggtcagcgatatttacggcgatgacgtcaagtacaccggaaaagtggtcggtctggacatggggaccggcagcgcgttcagcctgctgcctgcacagaacgccaccggcaactggatcaaagtggtacagcgcttgcctgtgcgtatcgagctggatcctaagcagctggcagaccatccgctgcgaattggcctttccacgctggtgacggtcgataccgccaaccgcgacggtcagatcctcgcaagccaggtgcgcagtacgccagcttatgaaagtaacgcccgtgaaattagcctcgatccggtcaataagctgatcgatgacatcgtgaaggcaaacgccggttaagccgaaggtgagcgttatgcaacagcaaaagccgcaaaaaccgctggagggggcgcagctggtcattatgaccattgcgctgtcgctggcgacattcatgcaggtgctggactccaccatcgcaaacgtggcgatccctacgatcgccgggaaccttggctcatcgctgagccaggggacctgggtcattacctcgttcggggtggcgaacgccatctccattcccatcaccggctggctggcgaagcgcgtcggtgaagtgaagctgttcctctggtcgacgatcctgttcgtgctggcctcctgggcctgcggcatgtccagcagcctgacgatgctgattttcttccgcgtcatccaggggattgtcgccgggccgttgattccgctgtcgcagagtttgctgctgaacaactatccgcccgccaagcgctccatcgcgctcgcgctgtggtcgatgacggtgatcgtcgccccaatttgcgggccaatcctcggcggctatatcagcgataactatcactggggctggatcttcttcatcaacgtgcccatcggtgcgctggtggtgctgatgacgctacagtctctgcgtggtcgcgaaacgcggaccgaacagcggcggatcgacggcatcgggctggcactgctggttgtcggcatcggcagcctgcaaatcatgctcgaccgcggcaaagagctggactggtttgcctctacggaaatcattgtgctgacggtggtcgccgtggtggccatcagcttcctgattgtctgggagctgacggacgataatccgatagtcgacctctcgctgtttaaatcgcgaaacttcaccatcggctgcctctgtatcagtctcgcctatatgctctacttcggcgcgattgttctgctgccgcagctgttgcaggaggtgtacggctataccgcaacctgggcggggctggcctccgcgccggtggggttaattccggttctgctgtcgccgattattggccgtttcgcccataagctcgacatgcgcaggctggtgacgttcagcttcatcatgtacgccgtgtgcttctactggcgcgcgtatacgtttgaaccgggaatggactttggcgcctccgcgtggccgcagtttattcagggcttcgccgtagcgtgcttctttatgccgctgaccaccattacgctttccggcttaccgcctgagcggatggcggcggcatcgagcctgtcgaacttcacccgtacgctggcgggctccatcgggacttcgatcaccaccacgctgtggaccaaccgggaatcgatgcaccatgctcaactcaccgaagcggtgaacccgttcaaccctaacgctcagcagatgtatagccagcttgaggggatggggatgacggagcagcaggcgtccggctggcttgcccagcagatcaccaaccaggggctgattatctcggcaaacgagattttctggatatcggcggggatcttcatcgtcctgctggggctggtgtggtttgccaaaccaccgtttggggccggtagcgggggcggtggggcgcactagccctgtgcacgggttgccgggtggcggctacgccttacccggcctacgatcgtaggcccggtaagcgcagcgccaccgggcaacaatcgccccccttgtccaaaatgcgacagcgattgtcagttccgataaagcagcgcgcctgaaatcgattcacgatagtgaaaagacaacaggagcgcaccatgctgaacacacccgccgaaaaataccagccttaccccaccctttcgttgcccgaccgccgctggccggagcagattatcacccgcgccccgcgctggctctcgaccgacttacgcgacggtaaccaggcgctggccgagccgatggacagcgcgcgcaagctgcaattctgggatctgctgctgagctgcgggtttaaagaaatcgaagtcgccttcccgtccgcctcgcagacggacttcaattttgtgcgtcagctgattgaggagaaccgcatcccggatgacgtcaccattcaggtgttaacgcaggcgcgggacgatcttatccgtcgcactttcgactccctgcgcggcgcgaagcaggccaccgttcacctgtataacgccaccgccccgctgttccgccgtctggtattcggcatggagaaagcgcaaatcgtcgagctggcgacgcgcgcgacgcgcctgattcgtcagctgtgtgaagagaaccctgacacccgctggcagtacgagtactccccggaaaccttctgctttaccgaaccggagtttgcgctggagatttgtgaagccgtggcggagatctggcagccgtgcgcggcgcgtccgatgatcgtcaacctgcccgctaccgtcgaggtgagcacgccgaacgtctatgccgaccagatcgagtatttctgccgccacttcagccgccgcagtgacgtctgtatcagcgtgcacccgcataacgatcgcggaacgggcgtcgccagcgcggagctggccgtcatggccggggcgtgaccgcgtggagggctgcctgtttggtaacggtgagcgcacgggcaacgtctgcctggtgacgctggcgatgaacctctacagccagggcattagcccgaatctggatttcagtgatatgaatcgggtggttgaaacggtagaaaccagcaaccagctgcccgtccatccgcgccatccgtgggcgggtcgtctggcttacaccgccttctccggctcgcaccaggatgccatcaagaaaggtttcgatgcccgtaagcctggcgaacgctgggagatgccctatctgcccgtcgacccgcaggatattggctgtacctatgaagcggtgatccgcgtgaacagccagtcaggaaaaagcggaagcgcctggcttattgagcaaaaccacggcctgaaattgcctcgcgccctgcaacaggattttagccagcacgtgcagcaggaaacggataaccatggaaaagagatgacgcagaatgcgctctggcagctgttccgcgcccgctacggcctggtggcgagcccgccattagcgctgcaatcgtaccgcagcgacagccagcaggacggccagctgcggctgacggcaagcgtcgccacgcaagggggcacccgccagctggaaggccagggaaacggtttgctctccgccgccgctcacggcttaagccgctggatcaacgcaccgtttgtgatcaaggattatcacgaacatacgttaggcgaacgcagcgacagccgctcggtggcctatatccgctgtctgttccaggatgggaccagccgctggggcgtgggcatcgacagcgacgtggcacgcgcgtcgattcaggcgctttttaacgcggtcagtcgttcctgaagtaatcgctgggtgagagacccattacccggcgaaacattgccgtaaaggcgctgtggctgccataccccagatccagcgccacgcgtaataccggctggccctgcgccagccgcactaaggcttccagcagtcgcgcccttctcacccactcgccgtagctcaggcctgtctgctgctgaaaatggcggttcagcgtgcgttcgctcatccccacaatacctgcggcctgggcgctgctccagctttctcccggggccattcgaatctgctggcagaggtggcgcagcgcttcgctttccggctcgggcaggtgaaacggcagtaccggcatgaggcgaatttcatcgaggatcagctcataaacacgttcatcgcggcttccgggtgcgtaagattcaggaagcgtaagggaggtcaggatcagctcgcgcagcaggggcgagatctgcacgatctggcaggtcgccggaagatcggcgcgcgccagcgggtcgataaacagcgtgcgggcagcaacgttgccggtgatgcgcaaggcgtgctgcgtacccgcaggtagccagacgccgcgaccgggcggcaccacccagcagccggatgcggtatcgacccgcacgacgccggtgaggctgtgcaggagctgcgcgcagtcgtgctgatgccacggctcgctgtcgccatgagcataatcatgcgaaaacggcacaagcgggcgatgggtaaaggagaaggtggtggttgtcgtcatcaggattgtaggcccggtcagcgaagcgccaccgggcatccacaggcacgatactaaatgtgcagttcctgaagtttttcttttggcagggccagctcgtcattgctgtttacacgaacatcacgttcgatgatatgacgggcaatctcctgagcttcttccagagagtgcatctggtaagtgccgcactggtaaacgttcagctcagggatctggttctgctctttcaccttcagcacgtcttccatcgccgctttccacgcatccgcgacgcgtttctcatcaggctgaccaatcaggctcatgtagaaaccggtgcggcagcccatcggagagatatcgatgatctccacgccgttgccgttcaggtggtcgcgcatgaatccggcgaacaggtgttccagcgtgtgaatgcctttctctggcatcacttctttattgggcacgcagaagcgcaggtcgaaaacggtgatcgtgtcgccgtgcggcgtgttcatggtcttcgccacgcggactgctggtgcttccatacgggtatggtcgacagtaaagctatctaataacggcatacgtcacctccgatagtgatttttttaaaataaactgaactcttctacagaatgcgcgtctgagtatatgaaagacgcgcatttgttatcatcatccctgaattcagagatgtatattttggccacagcgatgtggcctttttctttttggttcaggcctgcttcgccagaaacgcctcaaacgactccgtatccgccgcttcgacctctttctgacgcacaacggacgcatcacgctctgtcacaaaatccgcttcgctcaggatctctaacggctcctgcatcagcatctcacggtactccgctgagagtgaacgccctgtgccaccaattccctgctcaatcatagaacgcagaatacgtgctgagaatgtcagttccgggttatcaaagctttcaaccagttcgtcgcagaccttctggtaagcttcgccgccgtacacgctgtccagcgtctgggctacgcgcttcaggtcatggaacagatccttccctaccttagacagtgggaactgagccgtttcacagccaatacctaacgtcagacccggcttgcgcccttccagaatcacgcgattccagttggcacgggtacacagcagttcgtcggaactcatttccggcgcatccgccagtacgcaccagaccataaacaggtcaaggaagcgaacctgctgctcgtcaacgccaatcggtgagaacgggttgatatccagcgagcgcacttcaatgtattcgatcccgccgcgctgtagcgcatccgacggcgtttcaccgctgcgcgtcacgcgcttcggacgaatcggcgcatacagttcattttcaatctgcaacacgttagtgttaatttgcaggcgcttaccgtctttttcgaggccgattttttcgtactcttccgacggggtttttatcgcccgcttcaagcctgccacatattcgtgcagatcgttaaacgtaattccgagattactttgcgatttattggtatagccaaggtcgctcaggcgcagggaggtcgcatacggcaggtaatacatgccacattcggtcttctcgaacggcagcgtggtcggtttcccttgcaggaacgatgaacagatggccggggacgcgccgaacagatacggaataacccagccaaaacggtagtagttgcggatcaggcggaagtagcccgcggagatcgcttctttatccgtttcaccgcacttcgcctgccagaacgccatcggcagagagaaattgtagtgcacgccagagatcgtctgcatcagtgcgccgtagcgatttttcagtccttcgcgatacagcgtttttagccgaccaatattcgaggtgccgtactgcgccagctcgatatcctgcccctgctcgatatagcacggcatgctgagcggccacatacgctcgtcgccgaggttgcgggcggtgaagcgatgcacgtcgcgcatgatcgtcagcatatgatcaatatcaccgtctactggcgtgatgaactccagcagcgcttcggcgaaatcggttgtgatccatttatgtgtcagcgccgagcctaacgccttcgggtgtcccgtagtcgctaagctaccatccgcatttacgcgcagagtttcgcgctcaagcccacgctgaatacccttcagtgcctgagggtgattttccagccaggccagcgcctgtgatacgtccgggatcaatttgacctcccgcctgtcaaaaaattgtcactcagcataattgtaatggttgacgattgaaggtcgcgaattcattccaccaattagtgccaccacgtcataccctgtagtgttacccatgccagtaaaacatagcgtaacgccttgccaaggcacaaaaaaaagagcaccggtccccaggagatgcgcatccatcccgccagcagacacagtaaatcgcctattacaggcatccagcttaataacagcgtggcagcgccatagcgttttagccagcccactgccttttcctgccagcgagatttttcgcgtagcggaaagaaacgtccaagaataacgttagtcagccctccaaggctattacccattgttgctattaagaccagcaaccagggctgacttacgccggacaacagcatcgccaccagcaccacttccgaattccccggtaagagggtggagcttaaaaaactgctggcgaataatgaagcgagtgacagcgcgtcactcacagtaagcgaacgtccaccgccgccattccggcatcacgcgcggcctgaatgccaaaatcagcatcttcaaacaccacgcattttgcaggtggaacacccattaattctgcacagagcaggaaggtatccggtgcgggtttgtgatgtttaacatgatcggcggcaacgacggcagaaaaatagtggcgcaggccaaggtggttgagtagcgcttcagcaatcgcgctctcgctgcccgtaccgacagacataggacgacgcccgtgccactccttgacgacgtcaatgagtggtaaaggctgcacggtgtctaacagtatggcttttaccgcgtcggttttttcacgcgcgagctgatgcgggtcgagatcggcctgattcagctcaatcacggcctgtgcgatacgccaggtgggcgatccattgagggcaatcatcgcctgtaaatcgaaacgcataccgtaacggcccaggacttcggtccaggcctgacgatgcgtgggttcggtatccaggagggtgccgtccatgtcgaagatcaaaccgtcatactgtgcgtacatcgtgctctcgctaaacgattaacaaagcattactttatcgtaaaaggggatctttgtcgctgacagagagagtgattgctgacgaaacgtcgaaggaataaacaaagggggagaatannnnnnnnnnnnnnnnnnnnnnnnnnnnnnnnnnnnnnnnnnnnnnnnnnnnnnnnnnnnnnnnnnnnnnnnnnnnnnnnnnnnnnnnnnnnnnnnnnnnnnnnnnnnnnnnnnnnnnnnnnnnnnnnnnnnnnnnnnnnnnnnnnnnnnnnnnnnnnnnnnnnnnnnnnnnnnnnnnnnnnnnnnnnnnnnnnnnnnnnnnnnnnnnnnnnnnnnnnnnnnnnnnnnnnnnnnnnnnnnnnnnnnnnnnnnnnnnnnnnnnnnnnnnnnnnnnnnnnnnnnnnnnnnnnnnnnnnnnnnnnnnnnnnnnnnnnnnnnnnnnnnnnnnnnnnnnnnnnnnnnnnnnnnnnnnnnnnnnnnnnnnnnnnnnnnnnnnnnnnnnnnnnnnnnnnnnnnnnnnnnnnnnnnnnnnnnnnnnnnnnnnnnnnnnnnnnnnnnnnnnnnnnnnnnnnnnnnnnnnnnnnnnnnnnnnnnnnnnnnnnnnnnnnnnnnnnnnnnnnnnnnnnnnnnnnnnnnnnnnnnactgtactgctcgatattcatatcacttcgaaagcaatatgaagtaatagatggtgcatccgggaggattcgaacctccgaccgctcggttcgtagccgagtactctatccagctgagctacggatgcaaaatggcggtgaggcggggattcgaaccccggatgcagcttttgaccgcatactcccttagcaggggagcgccttcagcctctcggccacctcaccacacaacgcctctttcgagtgcttcgagcaactcgttaagagcttctcgtcgctgcgtggcgcatatattactttctgggacttataagtcaaacaattttccacatgcttttttcgtttgcacaattcgcacccaattcgcatgtaaaagccgcaaagagagtgttttataagcggattttgcaggcatcttcacagaattgtgttgagagaagcgcgtcttttggatgagataagattatgagagtggtcaaaaacgaagcgtttgaaatagaacggtaactttatgcaggaaaaatagcaggagggttgcgtctcgcccgacagcgagacgcgacaatatcagtaactggactgctgggatttttcagcctggatacgctggtagatctcttcacggtggacagatacttctttaggagcgttaacaccaatacgtacctggttaccctttacccctaaaactgtcacggtgacctcatccccaatcatgagggtctcaccaactcgacgagtcagaatcagcattctttgctccttgaaagattaaaagagtcgggtctcttgtatcccggcattatccatcatataacgccaaaaagtaagcgatgacaaacacgtaaagtgtaagcagtcacggcatcacattctgttaaacgtaagtttagccgatatacacaaactcaacctgactttatcgttatcgatagcgcagtgagcaagacgccataacgttaccgctatggcgtctgcttgtgctttgtagttattacagtttcgcgcttacccagctttcaacgctggctaatgccgcgggaagtgccgccgcatccgtaccaccggcttgcgccatgtccggacgaccgccacctttgccacccacctgctgggcgaccatgccaatcagttcccctgctttaacacgatccgtcacatccttagagacgcccgcaatcagagaaaccttaccctctgcgaccgttgccagcacgataaccgtcgaaccaagctggttcttcagatcgtcgaccatggtacgcagcatcttaggctcaacgcccgccagatcgctgaccagcagtttgacgcccttaatgtctaccgctttgctggagaggtttgcgctctcctgcgccgcagcctgttctttcagctgctggagttctttttccagctgacgggtacgatccagcgcgacacgcactttttcgcccaggttctgactatcgcctttcagcagctgcgcgatctcgtgcagctggtcgctctgcgcatgcaggctggcaatcgcgccttccccggtcaccgcctcaatacgacgcacgcctgccgccgtccccgactcggaaacaatgcggaacaagccgatgtcaccggtgcgggatgcgtgagtaccgccacacagttcggtagagaagtcgcccatgctcagcacgcgaacgcggtcgtcatatttctcgccaaacagcgccatcgcacctttcttcttcgctgcctcgagatccatgatgtgggtttcgattggcaggttacgacggatctgggcattcaccaggtcttccaccgcacgaatttcagacggcttcatcgcttcaaaatgcgagaagtcgaaacgcagcactttgtcattaaccagagaacctttctgtgcaacgtgcgtacccagcacttcgcgcagggctgcgtgcatcaggtgggttgccgagtggttcagacgaatgcgcgcgcggcgagcttcgtcaacgttggcctgaacgccctcgcccactttcagagagccggaaaccagtttgccctggtgaccaattgcctgaccgtatttctgggtatcgcttacgctgaagctgaagccattgcctttcagttcgcctttatcgccaacctggccgcccgattccgcatagaacggcgttttatccaggataacaaccgcttcctggcccgcgctaatgctgtctacggctttaccgtcaacaaacagcgcggtcacgttgctggtcagggccagctcttcgtagcctttaaattcagacgcgctatcaacgcggatcatcgcgttgtagtccgcgccaaaaccgctggattcacgcgcacgacgacgctgctcttccattgcggcttcaaagcctgcttcgtcaactttgatgttgcgctcgcggcaaacgtccgcggtcaggtcaaccgggaagccgtaggtgtcgtacaggcggaaagcggtttcgccatccaacgtgtcgcccttgagtttcgccagctcgtcgtccagcagcgccagaccgcgttccagcgtacgggcaaactgctcttcttcggttttcagaacctgttcaacctgcgcctgctggcgtttcagctcgtcaccggcagagcccatcacgccaatcagtggcccaacgagtttatagaagaaagtgtccttcgcgcccagcatgttgccatggcggatcgcacgacgaatgatacgacgcagcacatagccacggttttcattcgacgggataacgccgtcagcaatcaggaacgcacaggaacgaatatggtctgcgataacgcgcagtgatttgttgctcagatcggttgcgcccgttacctcagcaacggctttgatcagggtgctgaacaggtcaatctcatagttggagttaacgtgttgcagaacggccgcgatacgctcaaggcccataccggtatctacggacggttttggcagcggctccatggtgccgtcggcctgacggttgaactgcatgaagacgatgttccagatctcaatgtagcgatcgccatcttcttccgcgcttcccggagggccaccccagatgtggtcgccatgatcgtagaagatctcggtgcacggaccgcaagggccggtgtcgcccatctgccagaagttatcagacgcgtaaggcgcgcctttgttgtcaccgatacggatgatacgttcgcgcgggatacccacttctttttcccagatgtcgaacgcttcgtcatcggtctcatacacggtcacccacagacgctctttcggcagattgaaccagttttcaccggtcagcagttcccacgcgtattgaatggcgtcgtgtttgaaatagtcgccgaagctgaagttacccagcatttcgaagaaggtgtggtggcgcgcggtgtaaccgacgttttccagatcgttgtgtttaccgcccgcacgcacgcaacgctgtgaggttgtggcgcgggaataattacgcttgtcgagaccaaggaacacatccttgaactggttcatcccggcgttggtaaacagcagagtcgggtcattgttcggtaccagggagctgctggcaacaacctggtgtcccttactatggaaaaaatcgagaaacgcctgacggatctcagcggtgctcttgctcataattatcctgaaatcaagctaacgaaatgtcgcagcagatctgtatctgtaaacagttggacggaccagctactggaaaaagtgggaataagataagttttctttagtgggaagtaaaatcccgcatgcgttcaatcggtaaaattacgccagatatcctgaatatcttccatcaggaagccgcggtagagcaaaaagcgctggattttaactttttctgaaaattcacgcggcagcggctcaccgtactttcgtaccgcctgctcacgcgccagttcgcaccagtcaatttcactttcgcgcatggctttttcaatcgattcacgggctacgcctttctggttcagctcctggcggatacgcgctggcccatagcctttacgaccacggctggcaagaaagcgagcggcaaaacggccgtcatccagatagtgatgctcgtagcaccaggcaaccacgcggtcataatcttccgcggtggcatcaatgtcttccggaccgtttttgctcatgacgggcgctgacagtttccgccgcagctcctgttcgctatggtcacgcacggcaagaatacgcacggcccgatccagcaagcgtgagtaggctggtcggcgtgatgtcggttcactcataaaaaacctgtcgattcagaaatgcaaaaagggccgcatcagcagcccttcatttttatccgagaggattaaaagtcttcgttggtttcttcagcatccgcgccgtcgaccacgaaatcaggtttagagtcctggttgttcagcaggagttcacgcaccttcttctcaatctctttcgccgccgccgggttctctttcagccaggagatagcattcgctttaccctgaccaatcttgtcaccgttgtagctgtaccatgcgcccgctttttcaatcagcttctctttcacgcccaggtcaaccagctcgccgaggaagttgataccttcgccgtagaggatctggaactcagcctgtttgaacggtgctgcgattttgttcttcacaaccttcacgcgggtttcgctaccgactacgttatccccctctttcaccgcgccgatacggcggatatccagacggacagaagcgtagaatttcagtgcgttaccgccagtggtggtttccgggttaccgaacattacaccaattttcatacggatctggttgatgaagatcagcagcgtattggactgcttcaggttacccgccagcttacgcatcgcctggctcatcatacgtgccgcgaggcccatgtgagagtcaccgatttcaccttcaatttccgcttttggcgtcagcgccgcaacggagtcgacgatgatcacgtcaaccgcgcctgagcgcgccagcgcgtcacaaatttccagtgcctgctcgccggtgtccggctgggagcacagcaggttgtcgatatcaacgcccagtttacgggcatagaccgggtccagcgcgtgctcggcatcgataaacgcacaggttttaccttcgcgctgtgccgccgcaacaacctgcaacgtcagggtagttttacccgaggattccggaccgtagatttctacgatacggcccatcggcaaaccgccagcgcccagtgcgatatcaagagaaagcgaaccagtggagatagtttccacatccatggaacggtcttcacccaggcgcatgatggagcctttaccgaattgcttttcgatctggcccagtgctgccgccaacgctttctgtttgttttcgtcgatagccattattactcctgtcatgccgggagaagcaactgcgcttcaccatggacttctgttctgttgaggcaattatactgtatagtcatacagtatcaagtattttgtagaaattgttgccagagcgtttttaacgcgtattccgttgcctgacgacgcacgctttcgcggtcgccgctgaagcattcccggcgggtgatcccttcaccttttgaggtggcaaagccaaaccagacggtgccgacaggcttcacgtcgctgccgccgtccggccccgcgataccgctgatggagatagcgtaatctgcgcgcgcctctttcagcgcgccaatcgccatctcgatcaccaccggctcgctgaccgcgccatgctgctcaagcgtggcttcacgcacgccgatcatctgcgctttcgcctcgttactgtaggtcacaaagccgcgttcaaaccaggcggaactgccagcaatatcggtaattgctttcgccacccagccgccggtgcaggattctgcggtcgtgagagtcgcgccgcgctgtttcagcgccagccccaccacttcgcttagctgcatcaattcatggtcagtcattctcgctccaggccttagaaaaacatgcagcacaagatagcactttctcatcaaatatggggatgcgcgtcgggttttacgagggggcttcagaaaaaagccgatgcgggcgcatcggccagagagacgcttatttcatgctgttagcgagggtgtccacattgtggcgaaatgccttgacgtaggtgtccgccacgccgcccttcgcggacagcgcttccgggtaaagttcaccacccggctgggcgcccgtggcggtcgcaatctgcttcaccaggcgtgggtcaagctggttttccataaaccaggttttcacgccgtcagctttaatctgattgatgatctccgctacctgcgccgcgctggcttcactctcagacgacagcccctgcggcgccataaacgtcacgccgtaggcgcggctgaaatagccgaaggcgtcgtggctggtcagcactttgcgcttcgcctgtgggatgtcgctgaaacgctttttagcccaaccgtccagctgagagagctgcgcaatatagggtttaccggtagattcaagcgccgccgtatcttcaggatcggccttcaccagccctgagagaatattttgcgcatacagcgcgccgttcgccgcgctattccacgcgtgcggatcggtcacggttttaccgtcctcttccagcgtgtgcgttttcacgccgtccgaagcaaccaccagctggcctttgaatccggaggctttcaccagacggtcgagccagccctccagccccagcccattgaccaccaccacgtcagctttactcagcgccgcgctgtctttgggcgagggttcgaaagtatggggatcaccgtccggccccaccagcgtcgtcaccttcacacgatcgccgccaacctgctgcgtgatgtctcccaggatggaaaagctggtcaccacattaagcgttttcgccattacgccgtgcgtcatcatgccgagcgcgagcgccacggctaatcctgtacgtttcattgtttccccttgcgttaaaaaagcgcccgcaggctatccgccagcctgctgcgcgtgccaaataaaactgaaataaagaacaatgcgctggcggtcagcacaatggagggcccggcgggcagactcactgcccaggaaaggcttaagcccagccacgcgcaaaaaataccgctgatacccgccatcaaaagtaaccctggcagtgtgcgcacccagcagcgtgccgccacggcgggtaacatcatcagcccgacggccatcagcgtgccgagcacctgaaaaccggctaccaggttgagcaccagcagcgccagaaacagaccgtgtaacatcccgggcagccagcgcgcgttcacctgcaaccacgcggtatcaaacgcttcgctgaccagcccccgataaaaaatcgccagcgtgaggagcgtgaacatgcaaacgcccgtcacgaacagggctgacgcgctatccacggcgagaatggagccaaacagaagatgaagcagatcgacatttgaaccgcgcagcgacaccagcgtgacgcccagcgccagtgagcccaggtaaaaccccgcgaagctggcatcctctttaagcggcgtgcggcggctgaccagcccggccaccagcgcaacggcgatcccggcaataaacccgccgacagtcattgccagcagcgacatcccgctgagcagatagcccaccgcgacacccggcaaaatggcgtgagaaagggcgtcccccatcaggctcatccgacgcagctgaagaaatacgcccagcgcagtggtgctgacggagagcgccaggcaaaccaccagcgcgcgccgcataaagccgtactcaataaacggctggaagaagagatgccagatcatgccaccctcacccgctcggttttccagtgcggcgtatcagcgtccagccgcagcgtttgtgggaagtggcgcgagacgcgttcgctgtcgtgcagtaccgccagcagggtctgcccctgcatatacatctccagcatcagatccatcagcacgttgcaggtcgcttcatcgacgccggtgaaaggctcatccagcatcaccagcggcgcctgctgcaccaaaacgcgggcaaacagcatgcgctgaaactggccgccggaaagttcatctatggtagagaacgccatggactccagccccacgcgctccagcgcgccggcaatgcgcatgcgggtatcccgacgaaaaccggcaaacagtgagattgctggccagcagcccatactcaccacgtcctgcacggtcagaggaaattgcgcctccagcgcgtgacgctgcgccagccagcccaccaccggacgtctcccctgccagcgaaacgtaccgctgacgggcggaataaagccggcgagcgttttcagcagcgtggatttaccgcagccgttggccccgacgatggcggtcatgctcccgcgttcaatcacgccggacagcgcgcgcgtaacgggctggcgttcgtaacccgccaccaggtcgttcatcacgatcatggcaacgccaccgcccagcgcacggccaggccgagaaacagaatgagcaccagcgccagcagcagccgaaccggggatgagagagaaaacagggacatggatatctcaattcaaaaataatgttataacataacaataatgaaagacggttaagatgtaaacggtgggagtgaaatgggagtgtggcgaaatgtttctgcaaaattcccctctcccgtgggagagggtcagggtgagggcatcaggccgcaccgtgcatgcagccatgccgggtggcggcgttgccttacccggcctacccgtcagggtaacttactggctaaacggtgacgctgccggcacacgcgcctgagacaccgccagccccagctgccacaccgccatcgcatagtgcgtgctgtggttgtagcgggtaatggtgtagaagttcggcagcccgaaccagtactgataaccggttccgacatccaggcgcagcaggctcacctggtcaacattgcccagcggctgcgacggcgttaagcctgccgctgccagctgcgccacgctgtatttggttttaaatccgttttccagaccaaacgcctcgccgttcgcctgcaccgccacctggccgcccggcgtccagccatgcgctttgaagtagttggccacgctgccaatggcgtcttcgggatcccacaggttgatgtgaccatccccgttaaaatctaccgcgtactgcttataggaggacggcataaactggccgtagcccattgccccggcgaacgaccctttcagatcgagcggatcgtcctgttcgtctcgcgccatcagcaggaaggtttccagctcggaagagaaatactcggcgcggcgcgggtagttgaaggagagcgtcgccagcgcatcaaggatgcgggttttacccataatgcgtccccagcgggtctcgaccccaataataccgacgatgatctccggcggcacgccatagacctgccacgcacggttcagggcgtcttcatactgattccagaacaccacgccattctgcacgttgtccggggtaataaactgtttgcgatagcgcagccacgcgccgtttggcccggtcggcacctgggctgtcggcgcctgcctgtccatcaggcgcagcacgtagtccagacgcttcgcctgagacaaaatggcatgcagctgctggcggtcaaaaccgtgcttgctcaccattttatcgatgaactgttcggccgcagggttattcgcgaagtcgccgcccatctgcatcatattgtgctgcggctccagcaggaatcctccggaaggcgcgcccgccgttggctgagcggcttcggtcttgggtttgctactacaggcggacaggagaataagcgcaggcaacagcgctgcataacgacgcttgaacatgtggcatccatttaacgagttcggtaagaacccagtatggtaaagcatccccaactcctcaaggaagcggtacgcacctccccgacgcaaatccgtgcttttttccaccaaaaattattcacctcaccaataaactttcaaaataatacttttttctttcattgtgagatctgattaacactttaaaacctttcaaagtgattattattagccgcagatagacaaaaacaaacgccctacaggagagaataatgatagaaaccatcacccacggcgccgagtggttcatcgggctgtttcagaaaggcggcgaggtattcaccggcatggtgaccgggatcctgcccctgctgatcagcctgctggtgatcatgaacgccctgattaactttatcggccagcagcgtattgaacgcttcgcccagcgctgtgccggcaatccgctgtcccgctacctgatcctgcccttcatcggcacctttgtgttctgcaacccgatgaccttaagcctcggccgctttatgccagagaagtacaagccgagttattacgccgccgcctcctacagctgccattcaatgaacggcctgttcccgcacattaaccccggcgagctgtttgtctatctcgggatcgccagcggtcttactacgctgggactgccgctcggcccgctggcggtgagctatctgctggtcggcctggtgaccaacttcttccgcggctgggtgacggacctcactaccgccatttttgagaaaaaaatgggcattcagcttgatgagaaagtccagctttcgggagccacagtatgaaccggatccgcatagagaaaggcacgggcggctggggcggcccgctggagttcgacgctaccgaaggcaaaaagatcgtctacatcaccgcgggcacgcgcccggcgatcgtcgacacgctgcgcgagctgaccggctgggaagcagtcgacggcttcaaagagggcgagccgccggaagcggaaatcggcgtggcggtaatcgactgcggcggcaccctgcgctgcggcatctacccgaagcgccgcattccgacggtgaatattcactccacgggcaaatcaggcccgctggcgcagtacatccttgaggatatttatgtctcgggcgtgaaggaggacaacatcacgctggtgaatggcacatccgcaccgcaaaaagcggccccgcgcgagtacgacaccagcaaaaaaatcaccgagcagagcgacggcctgctggcgaaggtcgggatggggatggggtccgccgtggcggtgctgtttcagtccgggcgcgacaccatcgacacggtgctgaaaaccattctgccgtttatggcgttcgtctcggcgctgatcggcatcatcatggcctccggcctcggcgactggattgcccacggcctcgccccgctcgccagccacccgctcggcctggtgacgctggcgctgatctgctccttcccgctgctgtcgccgtttcttggcccgggcgcggtgattgcccaggtcatcggcgtgctgattggcgtgcagattggtctggggaatattcccccgcacctcgccctgcccgccctgtttgccattaacgctcaggcggcgtgcgacttcatccccgtcgggctgtcgctggcggaagcgcgccaggagaccgtgcgcgtgggcgtcccctccgtgctggtgagccgcttcctgacgggcgcgccaacggtgctaattgcctggtttgtctccggctttatttatcaataagaggttcctgccatgaccgtgatttaccagaccaccattacccgcatcggccagagcgcagccgatgcgctgagcgaccagatgctgatcaccttccgcgaaggggccccggcagatatcgaagagttttgcttcatccactgccacggcgagttaaacggcgagctgaaggccggtggccagctggaactgggcaaggcgcgctatgccgtnnnnnnnnnnnnnnnnnnnnnnnnnnnnnnnnnnnnnnnnnnnnnnnnnnnnnnnnnnnnnnnnnnnnnnnnnnnnnnnnnnnnnnnnnnnnnnnnnnnnnnnnnnnnnnnnnnnnnnnnnnnnnnnnnnnnnnnnnnnnnnnnnnnnnnnnnnnnnnnnnnnnnnnnnnnnnnnnnnnnnnnnnnnnnnnnnnnnnnnnnnnnnnnnnnnnnnnnnnnnnnnnnnnnnnnnnnnnnnnnnnnnnnnnnnnnnnnnnnnnnnnnnnnnnnnnnnnnnnnnnnnnnnnnnnnnnnnnnnnnnnnnnnnnnnnnnnnnnnnnnnnnnnnnnnnnnnnnnnnnnnnnnnnnnnnnnnnnnnnnnnnnnnnnnnnnnnnnnnnnnnnnnnnnnnnnnnnnnnnnnnnnnnnnnnnnnnnnnnnnnnnnnnnnnnnnnnnnnnnnnnnnnnnnnnnnnnnnnnnnnnnnnnnnnnnnnnnnnnnncattggtgggggacaaaccttaggcgagttcctctgccatgggcttgtcgcagagggctaccgcgtggcggtcgtggatattcagagtgagaaagccgcccgcgtagcggacgccatcaacaccgaatttggcgaagggatggcgtatggatttggcgccgacgccaccagcgagcagagcgtgatggcgctggcccgcggcgtggatgagatttttggtcgcaccgatctgctggtctacagcgcggggattgcgaaagcggcctttatcagcgatttcgaactgggggattttgaccgctcgttgcaggtgaatctggtgggctatttcctctgcgcccgcgaattttcccgtctgatgatccgcgacggtattcagggtcgcatcattcagatcaactcaaaatcggggaaagtgggcagcaagcacaactccggctacagcgcggcgaagtttggcggcgtcgggctgacgcagtctctggcgctggatctggccgaatacggcataaccgttcacgcgctgatgctgggtaacctgctgaaatccccgatgttccagtccctgctgccgcagtatgccgccaaacttggcatcaaagcggaggacgtcgaacagtactacatcgacaaagtgccgctgaagcgcgggtgcgattatcaggacgtgctgaacatgctgctgttttacgccagcccgaaagcctcgtactgcaccgggcagtcgattaacgtcaccggtgggcaggtgatgttctgagttcattccccggtggcgctgcgcttaccgggactacaatccccgtaggccgggtaaggcgcagccgccacccggcagttaaggagccgatatggtcaccgcactcatcaccgtcgccgccctcgcctggctttgccagatggcgtttggcggctggcaaatccgtcagtttaaccgcgcctttgatgccctgtgtcagaagggacgcgtgggcgtcgggcgttccgggggacgcttcaaaccgcgggttgtcgtcgctgttgcgctggatgaaaacaatatggtttgcgattccctcatcatgcgcggcgtaacggtgtttgcccgtccgaccaaaatccaggcgatcgacggcatttcgctgcatgaattacaacctgatgtgatcttcccccatgattcactctgtcagaatgcactatcattagcgcttaatctgaaacatggataatttcgttgtgaaagttataaacttgcggaattatcatttcgcaacgtaaggaacgaagcgcctatgaaaccacgtcagcggcaggcggccatacttgagcatctgcaaaagcagggaaagtgctcggtagaggatctggcccactactttgacaccaccggcacgacaatacgcaaggacctggtgttgctcgaaaactccggcgccgtcattcgtacctacggcggcgtggtgctcaataaagacgaagccgacccgcctatcgaccacaaaacgctgatcaatactcaccagaaagcgctgattgccgaagccgccgtcaaatttatccaggacggcgattccattatcctcgacgcaggcagtaccgtcctacagatgatcccgctgctcagccgctttaataacatcaccgtgatgaccaacagcctgcacatcgtcaatgccctgtcagagttcgacagcgagcagaccatcctgatgcccggtggcaccttccgtaaaaaatccgcgtcgtttcacgggcagctggcggagaatgccttcgaccacttcagcttcgataagctgtttatgggcacggacggcatcgacctcaacgcgggcgtgaccaccttcaacgaggtgttcagcgtcagcaaagcgatgtgcaacgccgcgcgggaagtgattttgatggcggactcgtcgaaatttggccgtaaaagccccaacattgtctgtagccttgaaagcgtcgataagctgattaccgacgcaggtatcgatccggcatttaaaaaagcgctggaagcgaagggcatcgacgtgatcgtaaccggagagaaaaatgagtgattttctgttaaacgcaggccgtcagaccctgctgctggagctacaggaagccagccgcctgccggaacgtctgggtgaggattttgttcgtgcagccaacaccattatccactgcgagggcaaagtgatcgtggcgggtatcggtaaatccggtcatatcggcaagaagattgccgcgacgcttgccagcaccggcaccccggcgttcttcgtgcatcctgccgaagcgctgcacggcgatctggggatgatcgaaagccgcgacgtgatgctgtttatctcctactccggttcagccaaagagctggatctcatcatccctcgcctgcaagaaaaatcggtggccctgttagcgatgaccggcaaatcccgttcgccgctggcgctggccgcgaaagcaacgctggatatttccgttgagcgcgaagcctgtccgatgcacctggcaccgacctccagcaccgtcaacacgctgatgatgggtgacgccctggcgatggcggtgatgcaggcgcgcggttttaatgaggaagatttcgcccgttcccatcctgcgggcgcgcttggggctcgtctgctcaacaaagttcaccacctgatgcgcacggacgatgccattcctcaggtcaaactcgacaccagcgtgatggacgccatgctggagctgagccgcaccgggctggggctggttgcggtatgcgacaatgaccgccaggtgaagggcgtcttcaccgacggcgacctgcgccgctggctggtgggcggcggcaagctggaggcgcgggtatccgaagcaatgacccagggcgggctgacgctgaatgccgacagccgcgcgattgaagccaaagaggtgctgatgaagcgcaaaatcaccgccgcgccggtggtggacgagcacggcaggctgtgcggcgcgatcaacctgcaagacttctaccaggcggggattatttaacccttcagccccagacgtttcgccagcctgtgaaggttggcgacgtccatctccagcgcccgcgcgcacgccgcccagctgcggttattctgctccagcgcgcgggcgatcatctgacgctggaacgcatccgtcgcctcgcgcaggttttcgttcacgctctcaggtatcaccggcttcacgggcggcatcgtttcctcatgcagcgcgaaatggcgcgcatgaataaccacttcatcccccgaacgcgttgcccgcgccagcaccaccgcgcggtggatcgcatgttccagttcacgcacgttacccggccagccgtagctcagcaggtgcgtcctcgcgccgggacttagcaccacgcgggaaagccccattttgagccgacactgttcgcagaaaaagcccgccagcagaaccacatcctcgccccgctcgcgcagcggcggcaccgtgagcgggaacacgctcagacggtggaacagatcggcgcggaaattccccgccagcacctcttcgcgcagatcgcggttcgtcgccgccagcacgcgcacatccacgcgtaagctgcgatcgtctcccacgcgttgaatatcgccatactgcaacacccgcagcagtttggcctgaagcgaaagggagagttcgccaatttcatcgaggaacagcgtgccgttatcagccatttcgaacttgccgctgcggttgctgatcgccccggtaaaggcccctttgacgtgtccgaacagctcgctttccgccacgctttccggcaacgccgcgcagttgagatagaccagcggattcaccgcacggggcgaggcttcgtggatcgcttttgccaccagctctttaccggtgccggtctccccgaagatcagcacgttcaaatcagacgcggcgacaatctcaatctcttttttgagctgcgccatgcccggcgaaaggccgatcatttcggtgtgcgccacctgctcaaacgccgtcgggctacccggaagaatattctggctctccagctgttctatcagcagggcgttgttcagcgccccggccgccagcgcggcaatcagccgtagctcttcgtcgctgaaggtatcgaactgatccggcgacatgnnnnnnnnnnnnnnnnnnnnnnnnnnnnnnnnnnnnnnnnnnnnnnnnnnnnnnnnnnnnnnnnnnnnnnnnnnnnnnnnnnnnnnnnnnnnnnnnnnnnnnnnnnnnnnnnnnnnnnnnnnnnnnnnnnnnnnnnnnnnnnnnnnnnnnnnnnnnnnnnnnnnnnnnnnnnnnnnnnnnnnnnnnnnnnnnnnnnnnnnnnnnnnnnnnnnnnnnnnnnnnnnnnnnnnnnnnnnnnnnnnnnnnnnnnnnnnnnnnnnnnnnnnnnnnnnnnnnnnnnnnnnnnnnnnnnnnnnnnnnnnnnnnnnnnnnnnnnnnnnnnnnnnnnnnnnnnnnnnnnnnnnnnnnnnnnnnnnnnnnnnnnnnnnnnnnnnnnnnnatacaggcgtgcaccttcaggctctcctgtccggggatcaggccgtcgtacggatcgggcagatcgctgtctgccgggaaacgcaccacgtcacccgcgcgggcgatggtttccagacgcgggtggccctccagggtaaagcgccgcccgagtacgtccttcgccagaccgtcgatagccagcggaataaactgccgcccttcgtaacgcagcagcgccgacgcatcgcaatccagcacgtggcgcaacgtggagatcagccgctgaaagcggtcctgatgaccaataccggtttgcagttctatggcgatcttcgccagcacatctacggaaaagctcatctctgcctcactgtcattttgacaatacatagtgtcatattgacaatttttaagatagtcaaaatgactacccattagggggcatcgaaacgaaaacacattattttcaacaagttaaaaagttggcacgcaacttgatatatgacagtcatcttatttgaaaacgccgtattaagttgaggttgctatgtctattctggttaaaaataacattcattgggtgggtcaacgtgactgggaagtacgtgattttcacgggacggaatacaaaacgctgcgcggcagcagctacaacagctatctcattcgtgaaggtaaaaacgtcctgatcgataccgtcgatcacaaattcagccgcgagttcgtgcagaacctgcgcagcgaaatcgatctgaatgacatcgactacattatcatcaaccacgcggaagaggatcatgccggggcgctgaccgagctgatgtcccacattccggataccccgatctactgcaccaccaacgccattgactccatcaacggccaccaccaccatccggagtggaacttccacaccgtgaaaaccggcgacacgctggatatcggcaatggcaaacagctgatcttcgtggaaaccccaatgctgcactggccggacagcatgatgacctacatgaccggtgacgcggtgctgttcagtaacgacgccttcggccagcactactgcgacgaacgtctgttcaacgacgaagtggatcagaccgagctgttcgaacagtgccagcgctactacgccaacatcctgaccccgttcagccgtctggtcacgccaaaaatcaccgagatcctcggcttcaacctgccggtggatatgattgccacctcccacggcgtggtatggcgtgaaaatccaacccagattgtcgaattgtacctgaagtgggcggcggactatcaggaagatcgcatcaccatcttctacgacaccatgtccaacaacacccgcatgatggcggacgccattgcccagggcatcaacgaagttgacccgaacgtggcggtgaaaatcttcaacgtggcgcgcagcgataagaatgaggtattgaccaacgtcttccgctccaaaggcgtgctggtgggtacctccaccatgaataacgtgatgatgccgaaaattgccggactggtggaagagatgaccggcctgcgctttcgtaacaaacgcgccagcgcctttggttcacacggctggagcggcggcgcggtagaccgtctctccacccgtttacaggatgccggttttgagatgtccctgagcctgaaggcgaaatggcgtccggatctcgacgcgctggaaatctgtcgtcagcacggtcgcgacattgcccgccagtgggcgcttgcgccgctgccggaaaccgcacccgccgcggcagttacgccgaaagctgtagcagaagccgctcctgccgctgccgacctcggcccttgcatgcagtgcagcgtctgccagtggatttacgatcctgagctgggcgagccgttgcaggatgtcgcgccgggtacgccgtggagcgaggtgccggacaacttcctctgcccggaatgttccctcgggaaagacgtctttgatgaactggcaacggaggcaaaatgagccacggcatcgtcattatcggctcgggctttgccgcccgccagctggtgaaaaatatccgcaaacaggatgctaacgtgccgttgacggtgatcgccgccgacagcatggatgagtacaacaagcctgatttaagccacgtcattagccagaatcagcgcgccgacgatctcacccgccagacggcgggggagttcgcagaacagtttaacctgcgtctgtttccgtacacctgggtcaccgatatcgacgccgacgcccacgtggtgaacgcgaaagataaaacctggcagtacgacaaactggtgctggcgacgggggcatcggcgtttgtgccgccggttgagggccgcgagctgatggtcacgctcaacagccagcaggagtatcaggccagcgagaccctgttacgcgacgccacgcgggtgatgattgtcggcggcggactgattggcaccgagctggcgatggacttctgccgggcgggaaaatccgtcaccctggttgaccacgcggccagcattctgtcagcgctgatgccggcagaagtaagcagtcgcttacagcatcgtctgaccgacatgggcgtacatctgctgctgaaatcgcagttacagagcctgagcaaaaccgaaaccggcatttgtgcgacgctcgaccgcaaccgcagcgttgaagtggatgtggttattgcggcgacggggttgcgcccggaaaccgcgctggcgcaccgcgcgggcgcagagatcaatcgcggcgtgaaggtggacagctacctgcaaaccacccagccggacatttatgccctgggcgactgcgcggaaattaacggccaggtgctgccgttcctgcaaccgattcagttaagcgccatgttcctggcgaaaaacctgctcggcggcaacgccccggtgaaattacccgccatgctggtgaaggtaaaaacgccggaactaccgctgcatctcgcaggtgaaacgcagcgtcaggatctggactgggagattgtcctttcgcctcagggcatggtggcgcgcggcaccgataccgacggtcagatgcgcgcctttgtcgtcagcgaagacagaatgaaggaggccttcgcgctgctgaaatcgctaccagcttaaccctcgtcatgccgggtggcgctccgcttacccggcctacagtactgccacgcttacttaacctttggattttgttgtccaccgccccgatgtcccggggctttttttatcgctacactttcagcgtcaggagcgcaccaccagcgcgtcataaccgcgccagcgatagttcgccatcgagatcagccagcaggcgacaaacagcccgaccaccacaaacccggcgtcgcccaggttatcgttcaccgcgccaatcagatcccatacgccaccgctgagggcgaacttgtccatcagcagacccagcgcttccaggccgccgataaacagcgccaccaccaccgaagtgccggtgatggtcatgttgtagtacagcttgcgctgcggcttgttaaacgcccagccgtaggcgcccaccatcagcaggttatcgagcgtatccaccagcgccatgccgctggcgaagagcgccgggaagatcatgatcgaccacaccgacatcccgctggaggcgctggcggcggagatccccagcacgccgatttcggtggcggtgtcgaaccccaggccgaacaggaaaccgaccaggtacnnnnnnnnnnnnnnnnnnnnnnnnnnnnnnnnnnnnnnnnnnnnnnnnnnnnnnnnnnnnnnnnnnnnnnnnnnnnnnnnnnnnnnnnnnnnnnnnnnnnnnnnnnnnnnnnnnnnnnnnnnnnnnnnnnnnnnnnnnnnnnnnnnnnnnnnnnnnnnnnnnnnnnnnnnnnnnnnnnnnnnnnnnnnnnnnnnnnnnnnnnnnnnnnnnnnnnnnnnnnnnnnnnnnnnnnnnnnnnnnnnnnnnnnnnnnnnnnnnnnnnnnnnnnnnnnnnnnnnnnnnnnnnnnnnnnnnnnnnnnnnnnnnnnnnnnnnnnnnnnnnnnnnnnnnnnnnnnnnnnnnnnnnnnnnnnnnnnnnnnnnnnnnnnnnnnnnnnnnnnnnnnnnnnnnnnnnnnnnnnnnnnnnnnnnnnnnnnnnnnnnnnnnnnnnnnnnnnnnnnnnnnnnnnnnnnnnnnnnnnnnnnnnnnnnnnnnnnnnnnnnnnnnnnnnnnnnnnnnnnnnnnnnnnnnnnnnnnnnnnnnnnnnnnnnnnnnnnnnnnnnnnnnnnnnnnnnnnnnnnnnnnnnnnnnnnnnnnnnnnnnnnnnnnnnnnnnnnnnnnnnnnnnnnnnnnnnnnnnnnnnnnnnnnnnnnnnnnnnnnnnnnnnnnnnnnnnnnnnnnnnnnnnnnnnnnnnnnnnnnnnnnntgcacgaggttcattgcgtaaaagtcgtaacattttaaatcccttgtgaacatgatcgggcggcagcaaccaccgcctgcccgaaggagatcgctccgtcgcctgcgggcaggcgcgaaggaaaaagaagcgtgaaatcagaaaggtagtgacgaaggcgcgcgcgcagcaggcggttgtgaaggacgccgccgctgaagcacaccgtagagagcgaccgtcggcgggcatgcgttgccgccagttcgctcagcccttttgccagcgcatcgtgaaaggcccaggcgcgctcgccggactccgcccgccaggccagccactgctgccagaacaacgcaaggttatccgtctggagcgtcaccggatgatcaacccctgcacagcgttcggccagcgcctccagccggcacgcggcttcgccctcatagcgttgcgtttcaatgcccaacgcacaggccacggcgtcgaacagacgaccacaggaggaggcccgcggcgcattgataccgcgcgacaccgccgttgccagcagcggccagttttgacgctgtaccacctcagtttccgggtactgctgccagtcaggtacgaacgccagacagtgggcgagcaaattgcgccacggctgttttgccgccagatcgccccccggcagcgcaacggctggcagaccgcccagccgttcgcagtcgcgatagttcacccgcaggcactcgccgccccacagcgcgccgttctcgcccatgccgatcccgtccagcgtcagggcaataacatccccgccgtcgagcggccagccattctccgccagacacgctgccgcatgcgcatgatgatgcagcacggtctcaacgggcagcgcctgcgcccgggcccacagtcgggcgtgataacccggatgggcatcgcacaccacgcgctcaggctgaaaggcgtagatgtcctgcatcgtcgagagcgcactgcgccactgcgcctctaccccctcgtcgctcagatcgccaaaatgctggctcagcaccgcctggttgccacgcaccaggctgaaggtgtttttcatctccgcgccggtgcataacatgggcgggatgtcgcggaatccggcgggcaatgtgatggcatccggcacaaaaccgcgtgcgcgacgcagcatcgtgccctcctggtccatcactgaatcatccatccgttgcaggatgtcgcggttgtgcagcaggaagccgtcagcgatgtcactgagttcttccagcgcctgctggttgcttatggcgggtggatggccgctgaggttgccggaggtcatcaccagcgggcgctggcagtccagcatcagcaaatgctggagcgggttcgcaggcagcatcacgccgaccgtatccagccccggcgcaatctcctcaggaaacgcaggaaggcaggcttttggcgtcagcacaatcggcgcagcgggtgaacgtaacagcgtctggatggcctccggcagatcgtccgcatgcgggatcatcaccgccagcggcctggtcgggcgctgcttgcgtgcccgtaatttccgaaccgcctgcgggttaagcgcgtcgcagaccaggtgaaaaccgcccagccctttgaccgccacaatcccgccgccttccagcatcgccaccgccgcgcttaacgccgattcgcgggtggcagcagcctccccggctcgccactccagctgcggtccgcagtccgggcaggccaccggctgggcgtgaaaacgccggtcagccgggttgcggtactccgtttcacagggcacacagagcgggaatggcgccattgacgtggccgggcggtcatagggcatggcgcggataatggtaaaccgcggcccgcagtgggtgcagttgataaacgggtagcggtagcgacgttcgcggggatcgcgcatctccgccaggcatgcgggacaggtggcggcatccgggacgatttgcgtgtccatcgccccgctctcgctgtggcggatgacaaactcgtccggcagcgtcgtccagctgaacggctgcgtttcaacgcgatcgatgcgcgcaagcggtgggcagtcctggcgcagtctcgcggtaaagtcacccccactgcccgcgagacgcaccaggacaccctctccgtcgttgcagacgtcgcctgccagccccagctggtgcgcaagctgccagacgaagggacgaaatcctaccccctgcaccttgccgcgcacccgaagctgtacgccattaacgcgcattgcagcttaaaacagcagcgatgacgaggtgtcgaacgccgcgcggcggcgtttttcggcgctcatctgttcgagcttgtcgcgatcgacgcagaccagcgcatgcgtcggacaggcttccatacacgccggaccggcatcgcggtggtagcagaggtcacatttattggcttcggctttctccgcgcgtacgctcagcccgataccgctgttgcgcaccaccgggcgaaccaccacctccatcgcgccatacggacacgccaccacacaggttttgcacccgatgcagcgctcctgcatcacatgcacgaagcctttctcgcgcttaatcgccccgttcggacagacgttggcgcacggcgcgtcttcgcactggcgacagatagcggcggtagaaatattcacgcctttaatgacgtggatgcgcggcaggaaggcatcaggggtgagagaggcgcaatcctgctctgcctgatgggacaccacgcacgccacttcacaggtacggcaaccaatgcatttgctggcatcggccataataaaacggttcatctgcttctccggcataactgttatgcgcgaagctattcataaaccgtgccaatatttaatgaattgattttatagggaaatttaaaagagaaggatctgtcatcgtcattagtgacgatgacagatgtcgacgtcagcgatgcgggccgtcaatgacggagccgcgcaggataagctcgccggaaaaggtttgctgaggcttaaactcaccgccgtcgagcatgaaaatcatacggctgatggtctcctgaatcatctccgttactggaatacgcacgctggagagggacggcacgatatagggcgcgattgccacatcgtcaaagccgatgacggacactgcgcccggcgtggagacgccgctctcgtgcagctgcctgatggcgccaatcgccatgtcgtcgttactcgccaccagcgcggtaaacgtttcgccgcgggtgagcaactgagagaccgccgccgcgccgctggccgggttccacttcccttcggcgatcagcgcgtcgcgaactgcaatcccgtgctgcgccagcgcgtccttgtagccggaaagacgctccaccccggtgggggaatccagcgaaccggtgataaacgcaatctcccggtggcctttctcaatcagctgcgataccgcgtcctgacacgacgctttatgatcggaccagacgctgtgactgctgtttttccgcaaacggcggttgagcaccatgatcggctgctcgcatttctcaatgatctcgtccagcgcttccacgctcagaaaacgcggatatatgattaccgcgtcgcagcgcatgtcgagcaggtactggatcgcctcgcgctcctcttcggcgctgtgcttaccgtccgccaggatcagctgacgccccttctcttccgtcatccgcgcggcgttaaacagcagctcgctaaagtagaccccatggtacagggtgttcgtcaccaccagccccagagtctgggtgcgtttggtcgccaggtttcgcgccagcagattggggcgatacccgctctcttcgatggcctgaaaaacccggtctttcgtctcctggctgacgtaaccgttccccgacagtacccgggagaccgtcgcttttgatacgcctgcccgcttcgccacttccagcatcgtggtcatattattattccgtctgaacctgatgggcgcagtgtactgcaccgcagaaaaattgtcgcagcggcgttatcacgctttttacggccacgagtgatcgtcatcacgaaacgaaaaaatgcataaaaagtggtcttgtttcattaaaagaaactcatgatgattgtgtgaaaccggtttcctacacttctcacaacgataacaggatcacatccgatggcaaaaaattacgctgcgctggcgaccgacgtcgttagcgcgctgggcggcaaagagaacatcgtcgccgtcacccactgtatgacgcgactgcgcttcgtcctgaaagacgaaagcctcaccgacgccgcacgcctgaaaagcatcagcggcgtgctcggcgtggtgcgcaacgacaaccagtgtcaggtgatcatcggcaacaccgtgtcccaggcataccgtgaagtggtgagcctgctgcccgctaacctgcaacctgccgtagcggaaggtccacagaagctcacgctgcgccggattggcgccgggatcctcgacgcgctgatcggcaccatgtctccgctgatcccggcgatcatcggcgggtcgatggtcaagctgctggcgatgatccttgagatgaccggcgtgctgggcaaaggcgacccgacgctgacgatcctgaccgttatcggcgatggcgcgttcttcttcctgccgctgatggtggcggcgtccgcggcggtgaagttcaaaaccaacatgtcgctggcgattgctatcgcgggcgtactggttcacccgagctttatcgagctgatggccaaggccgcgcagggtgagcacgttgagttcgccttcattccggtgacggcggtgaaatacacctacaccgttatcccggcgctggtgatgacctggtgcctgtcgtacatcgaacgctgggtggatcgcatcaccccggcggtaaccaaaacttcctcaagccgatgctgatcgtgctgattgccgccccgctcgccatcgtactgattggcccgctcgggatctggatcggcagcgccatctccgcgctggtctacaccattcacggctatctgggctggctctccgttgccattatgggcgcgctgtggccgctgctggtgatgaccgggatgcaccgcgtgtttacgccgaccatcatccagaccattgccgaaacgggcaaagaagggatggtgatgccgtcggaaatcggcgccaacctgtcgctcggcggttcgtcgctggcggtggcgtggaaaaccnnnnnnnnnnnnnnnnnnnnnnnnnnnnnnnnnnnnnnnnnnnnnnnnnnnnnnnnnnnnnnnnnnnnnnnnnnnnnnnnnnnnnnnnnnnnnnnnnnnnnnnnnnnnnnnnnnnnnnnnnnnnnnnnnnnnnnnnnnnnnnnnnnnnnnnnnnnnnnnnnnnnnnnnnnnnnnnnnnnnnnnnnnnnnnnnnnnnnnnnnnnnnnnnnnnnnnnnnnnnnnnnnnnnnnnnnnnnnnnnnnnnnnnnnnnnnnnnnnnnnnnnnnnnnnnnnnnnnnnnnnnnnnnnnnnnnnnnnnnnnnnnnnnnnnnnnnnnnnnnnnnnnnnnnnnnnnnnnnnnnnnnnnnnnnnnnnnnnnnnnnnnnnnnnnnnnnnnnnnnnnnnnnnnnnnnnnnnnnnnnnnncaggccttgccagccattcgatggcggcgccggggctgtttaccagcgtgcagttcttcgacccggccaacccgatgaccatcgtctgggtgtttggcgtgatgggtctggcggtagtgctgtcgtttgtgctaaccctgctgttagggtttgaggatatcccggtagaagacgaagccgaaaaagcacgcgccctgcaaaccgcaccggtacagaacaaagcagcagaagcataaactgaaagcgaggtaagaatgtctgtttttccacaaggatttttatggggcggcgcgcttgccgccaaccagagtgaaggggcttaccgtgaaggcggcaaaggactgacgacggtcgacatgatcccccacggcgcaaaccgtctggcggtaaaagtcggcaaggaaaaacggttttcgttgcgggacgacgaattctacccgagccacgaggcgattgatttttaccatcgctacaaagaagacatcgccctgatggcggagatgggctttacggtgttccgcacctcgattgcctggagccgcctctacccgaacggcgacgaaccgctgccgaatcaggaaggcattgccttctaccgcgcggtgttcgaggagtgtaaaaagtacaacatcgagccgctggtgacgctctgccacttcgacgtgccgatgcacctggtgacggagtacggctcctggcgcaaccgtaagatggtggatttcttcgcccgctacgcccgcacctgcttcgaggcgtttaacgggctggtgaaatactggctgaccttcaacgaaatcaacatcatgctgcacagcccgttctccggcgcggggctggtatttgaagaaggtgaaaacgaggaccaggtgaagtaccaggccgcgcaccacgagctggtggcgagcgcgctggcgacccaaattgcccacgaggtgaacccggaaaaccaggtcggttgtatgctggcgggcggcaatttttacccctggtcctgcaagccggaagacgtgtggatggcgctggaaaaagaccgcgagaacctgttctttatcgacgtgcaggcgcgcggcagctatccggcttactctgcccgcgtgttccgcgagaaaggcgtggtgattgtgaaagacccgggcgacgatgaactgctgaaaaacaccgtcgactttgtctcgttcagctattacgcctcgcgctgcgcgtcggcggacatgaacgcgggaaacaccagcgcggcgaacatcgtgaagtccctgcgcaacccgcatattcaggtgagcgagtggggctggggcatcgacccgctcggcctgcgcatcaccatgaacatgatgtatgaccgctaccagaagccgctgttcctggtggaaaacggccttggagcgaaggacgtcattgatgaaaacggcgagatcaacgacgactaccgcatcagctacctgcgcgagcatattcgcgcgatggctgatgcgattgaggacggcgtaccgctgctgggctacaccacctggggctgcattgaccttgtctcggcctcaacgggggaaatgagcaagcgctacgggtttgtgtacgtcgaccgggacgacgccgggaacggcacgctggaccgcaagcgcaagaaatcattctggtggtataagaaggtgattgcgagtaacgggggggatctggagtagcctgttgccctcaccccagccctctcccacagggagagggggatgggtttggtaggccgggtaaggcgaagccgccacccggcactgctcagagctgagaaaatcccccatccccaacccacccggcaagccgtgaatagaccacgtccaccgcctctttcaccggcggcgtcatcgggtaatagaacccgacaatgtccggctgaatccccagaaacagcacctcacccacgtcgtctttaatctgatcgaccaggtagttcagcggcatattgtgcgtcgtcatcataaacatttcggcgatgtcgtccgggtcaatcaggcggatctcaccggggttgagccccatatcggtggcatcaacgattaacagcctgtccgggcgcagctcgcgaatggccaccacgtcgttttccggcgcgctgccgccgtcaatcaccacccagctgcccggcgggtttgcggcgcacagttccgccagcagcggacccgcgccgtcgtcgcccatcatgctgttgccgacacacagtaaaacgtcagtcacgtaatctcctcaccatcaggtagatggcgctctcctgatgaatatcgtgcagcatgccgagcagcgttttgctccatgcctgctgcaccggggtttgtacgctcagcgccgcgtcaaaggcgttggcaagcatcgtgatgtggttggcgtcgatcacgatctcgccgtacttcggcacgccttccattttgcgccgcgccgtgctgccctcatccagcgtggcgatccacgccaggtaatcggcccacgggcagctcagcgccgcctccaggcagtcgatcaccccgaggtggtgcccaatcgccagactgtaatagaccacctgctgcgccgcatccggcgtggcgtcgttctcatcaataaacttacggctcagctggctgaacaccaccgtttcactcatcggatacgcgcctcatccacgatgctgttcaggttcgccacgatctcattgagtcgcggatcgttttccgcctccagccagcgcgccacctgatggtcgccctggctcagcaggcgcagataatcgtcggcaatctggcggccatagcgatagcccgccagtttccgcgccttgcggtcaaccttcacccgcagcggctgcaccatatccgggtgcaggatagtggctggctggttgtccagctcgcccggctcgcgggcgtggattttctgctccagcaggccgagcgccatggcaaaaccgtacagcgtggcggcgggcgtcggcgggcagcccggaatgtagacgtccaccggcacgattttgtcggtgccgccccagacgcagtacaggtcgtggaagatgccgccgctgttgccgcaggcaccgtacgagatgcagattttcgggtccggcgcggactgccaggcgcgcagcgcgggggatcgcatggcgcgggtgacggccccggtaaacagcagaatgtccgcatggcgcggagacggcaccactttgatgccgaagcgctcggcgtcaaacagcggtgacagcgtggcgaagatctcgatctcgcagccgttgcagccgccgcagtccacgcggtagacgtaggccgagcgtttgatttttttcagcagcgacgccttcatgctggcgatggattcgtccaccgtcatcggcaccggaatgccgttagcgtcgcgcgggccgagtaagttttccatcagctggcctctctcatatggcgggtgatatcaatacggtcggacggcagcaggcatttctgacgcttgcactccgggcaggtttcgaagctttcacggtgatgctccgcgcggacgtcgccgttgtgcttcagcagcgcgatggcgtagtcgatctctttttgcacggcgaacggacgcttgcagacgcggcagttgcacagcgcaaagcgcgactgctggaggaagtcctcttttttccacaccgccagctcgtactcctgagacaggcgaatggccaccgtcgggcagacctcctcgcagcggccgcagaagatgcagcgcccgaggttaaactgccaggccagctcgccggttttcaggtccgtttccaccgttaaggcattcgacgggcaggcgttgacgcaggccgcgcagccgatgcactgctgcgggttgtgctccggcttgccgcgaaagtttttatccaccgggatcggctccagcggataactgctggtctgcgcgccggttttgatcacttttttgatgaaggtaaacatggcgaatccttatttcagcggcgagttcttacgctcgatgctgtagcgctcaagctctttgtacggcaccacctggcttttcttcttgcgcacgtccacgacggtcatgcggtcggtgcaggagtagcacgggtcgaggctgccgatgatcagcggcgcgtcagagaccgtattgccgcgcagcatgtagcgcagggttggccagttggcgtaggtcgccgcgcggcagcgccagcggtagagcttctggttgtcgccggtcatgctccagtggatgtcgtccccgcgcggcgcttcggcaaagccgagggcaaagcggtttggaatgtaggtgaagccttccaccatcagcgggccgcccggcagattatcgaggccgtagtcgatcatgttcagcgcggtgaatacctcgttgatgcgcaccttcaggcgggagataacgtcgcagccctgctcgctgtgcacggtcatcggcagcaggccgtagccgacgaacgggtgatcggcgcgggtatcgcgggcgtggccgctggcgcgcaccatcggaccaacgttactgaagtcgcgggcgatttccgggtcaagacggccgatgcccacggtgcgctgctcgatgtttggcgtgctgagcagcatgtccaccagctcctgcacgtcccgccgcatctgctgcgccagctggcgggtctggatcatgtcgtctttcagcaggtcgcggcggatcccgccgatcaggttcaggccgtaggttttacgcgccccggtaaggatctccgccatcttcatcgacgcctcgcgcacgcggaagaactgcataaacccggagtcaaagccgacgaagtggcaggccaggccgaggttgagcaggtgcgagtgcaggcgctccacctccagcagaatggcgcggatcatctgcgcgcgttccggcaccacgatccccatgccgttttccacagaggtggtgtaggcggtgctgtgggcaaagccgcagatgccgcatacgcggtcagagaggaacgtgacttcgttgtagcccatgcgggtctccgccagcttctccatgccgcggtggacgtagaacaggcggtagtcggcgtcgataatgttctcgccgtcgacgaacaggcggaagtggcccggttcgtcggaggtaacgtgcagcgggccaatcggcaccacgttattcttcttgctgcccagctcgttgatgaactcgtaggtttcgctgtcggtggtcggggccgggcgctggcggtagtccatgctgtccttgcgcagcggatagagttcatccggccagtcgtccggcagcaccaggcgacgctcgtcaggcaggccaaccggcaccagaccatacatgtcacgcacttcgcgctcgccccagacggcggcaggcacgcgcggcgtgacggaggggtattccggtttagccggatcgacctctacgcgcacggtgagccagcacttctccccctgctccatcgacatcacgtagtacaccgcatagttgccacacagctgacgctcgtcgttgccgaacagcactgacagccagccgccctgctggtaatagagaaactccaccacttccggcagatagttcaccttaatggtgacggtgatctggtctttggtttgccaggactcctccagcaccacgcccgggaaagcctgatgcaacgcggcgagatactgctgacctttcttttcttcagacataaacactctctttaatcacgccaccagcaaggagacgaacgctaaaaatgcaaaaccaaaaccggcccaggtgatgcgtgacgtttcgacaaaacgcaggcgcgccatgctgttttcaaacagggcaatcaccagcacgccgaaaatcagcttgagcgcagccaccaccacggccagcagcaggccgcccgcagagaagtgcgtcatctgcccccacgggaagaaaacgccgacgaacatctgcaacaccaccagctgcttgaggctgatgccccacttcagcaccgcaaagccgtagccgctgtattcggtaagcggcccctcctgtaattcctgctccgcttccgcgagatcgaacggcagcttgcccatctcgataaaggtggcgaacgcgcaggcgcagagcgccagcaccagcgggagagaacgtgaaaccggccagtggtaaacggtgtcggtgataaaactgatatgggtcgagcctgcaacctgcgcggcaacccacagccccagcagcagaattggctcaaccagcacgccgagcatcgcttcgcggctggcgccgatacccgtaaacgggctgccggtatccagacccgcaatcgcaaagaagaaacgcgcgatggcgaagaggtagatcagcgtaatcagatcgcccagcaccggcagcggcgagcccaccgtcaccaccggcagcgcggtggcgatggtcagcatcacgcccaccatcacaaacggcgtcaggcggaacacccagcctgcggcgtccggcgcgacgctctgacgggaaagcagtttgaagagatcgcggtactcctggagcacgccaggtccgcgacggttgtgcagccgggcgcgcgccacgcgcgtgatgcccgacagcagcggcgcggcggcgaacagcaccagcgcctgaagaattgccagtaacagactcatgtcaggctcctcgtgaaatgacaatcaccaccagcaccgccagctcgatcagcgccaggcggcggaacagtacgggcacggcggcaccctgccagcccggcacccagcccaccgggttcagccagtggcgcagcttcagcacggcggcaaagttctccttcaccggcatagcgaaaccgtgggcggtgatgaccatcgactgctcatgttcgtagccgcaggcccacgccgcgccgcgcgagcgggaggcgagacggtcgcgtctgaagaacagcatcagcacgaacggcaggagcggcgcggcaatcagcagcagcgccatcatcggctgggaaacgacggtatgcgccgtgaccagcggcagcggaatggcgtggcccagcagcggcagcagccacggcgcggcaaccccgcccgcgatgcagcacagcgccagcgcgaccacgctggtggccatcagtaccggggtgcagcaggcgttttccgcttcgcgggtgcgcggcgcgcccaggaaggtgacgccgtaaaccttcgccatacacatcaccgccagcgcgccggtgatcgccaggcccaccgccagcagcgggccgagtaaacgcccgataaacgcctcgctctggccgagggcgaagaaggactggtaaatcacccactcgccggcaaagccgttcagcggcggcagcgcagccatcgccatcagcccgaccaacatcgccagcgaaatgacgggcatttttttgccaatcccgccgagcttttcaatatcgcggtgcccggtgcggaaccagacgctgcccgcaccgaggaacagggtgcttttaaacagactgtggttgataaggtgatacagaccgccaataaacccggcggcaatcagcgccggctggttgagcgccagcccggtgacgcccgcgcccatgccgagcaggataatcccgatgttctccagggtgtggtacgccagcagacgctggatgttgtgctccatcagcgcgtagaggccaccgacgaacgcggtgatcatccccgcaatcagcagcgccacgccccaccacagcggcggctgatcgcccgtcagggttatcatcaggatgccgaacagaccgaccttcatcaccacggtggagaacagtgcagcggccggggctgaggcattggcatgcgcctgcggcacccagccgtgcagcgggattatcccggccagcaggccaaaaccgactacgcccaacagccagacgtcgttgcccagcggctgaccgttaagcgcggcaaaatccagcgtgccgaaacgctgccacaccagccagcaggccagcgccagcagcagcgtgccgagacgtcccagcgcaaaccacagcttgccggaggcgctgcatccggtcaggaacacgccgcacagggccatgatttctgccatcaccaccagcgcgccgaggttgctggcgacaacggtacagaccgcggcggccatcaacaggttaaccagcaggccgttggcgttggtgtgctgatggcggtgccagtcgatattaaacaggctgataaacagcccgcacaggccaaaggttatcagccagatggcgttcagcggcgtaagctcaacggcgtggtgaatcagcgggatgagggtgtcgacggactggccgtcgatcaggacaaccccgcccgccgccagcgtcatcaggctgccgaccgccccgccgataccggcgatcgccccgctcagcgttttatggaaggagaggagcagcgccaggacagcggcggcggcaaaccaggccacgccgctggtcatcataactatcgcgttcatttcgccccctcgttaagcgcccgcagcagcgaaagatcgccgacgtcggtattgatggtcagctcgcgcttgcgtttgctggtgcgagcgatatcgcggatgttgaccaggaccagcgcccgggtcgggcaggtccgcacgcaggccggaccctgctcatcgaagctgcacaggtcgcacttcaccgcaacggcgcgaatgcccggcacccagtccagcagcgtactcacgcgtgccggagccggtggcgcaggcggcgcttttgcagtattagcattcgccggaatatgcagcggacggctgccggaaaactcaatggcaccgaacggacaggcgatgccgcacagcttgcagctcacgcacaggctttcgttcagctgtaccgcgccgtcaacgcgggtgatggcattgacaggacagacgcccgcgcacggggcgtcttcacagtggtgacagagctgcggggcagactctttctcattacgcatgacgcgcaggcgcggcatggactgtagcccgtgcaggcggtgcgtttccgagcacgccgcctcacaggtccgacagccaatacagaccgtcgagtcagcaattacaaaacggttnnnnnnnnnnnnnnnnnnnnnnnnnnnnnnnnnnnnnnnnnnnnnnnnnnnnnnnnnnnnnnnnnnnnnnnnnnnnnnnnnnnnnnnnnnnnnnnnnnnnnnnnnnnnnnnnnnnnnnnnnnnnnnnnnnnnnnnnnnnnnnnnnnnnnnnnnnnnnnnnnnnnnnnnnnnnnnnnnnnnnnnnnnnnnnnnnnnnnnnnnnnnnnnnnnnnnnnnnnnnnnnnnnnnnnnnnnnnnnnnnnnnnnnnnnnnnnnnnnnnnnnnnnnnnnnnnnnnnnnnnnnnnnnnnnnnnnnnnnnnnnnnnnnnnnnnnnnnnnnnnnnnnnnnnnnnnnnnnnnnnnnnnnnnnnnnnnnnnnnnnnnnnnnnnnnnnnnnnnnnnnnnnnnnnnnnnnnnnnnnnnnnnnnnnnnnnnnnnnnnnnnnnnnnnnnnnnnnnnnnnnnnnnnnnnnnnnnnnnnnnnnnnnnnnnnnnnnnnnnnnnnnnnnnnnnnnnnnnnnnnnnnnnnnnnnnnnnnnnnnnnnnnctgtctatcgacacttctcgacactcgtttttctaggccacgttcgcggaggattttccgtcgatcagctgtttcaggttgactggcctgtcatgctcaacggcggcgtagaggccgttgtaaaccggcgcgattttctccagatagtgctccagcacctgctggcgatcgcggttgctgacgtgaccgtccaccatgccgtccgccatcagctgcgcccgggcgatgcagtgcctgtcgccctctttcgtctcgacgtagtactcaatcgtgtggctgttgaaggtctccgccagggtgacgtaaatcgtaaagtggccgaacaggacaaaacacatatccccctgcgccgcacagctcatggcgtgatgcagatgggccttcgacagcgtgatcccctggatcagtgaattgcagtacaggtgccattgctcctggagctgctgatgacgttgcgcgatgtaatccgctttttcgctaatttcccaaatagtcataaaaggtatccggttaatggagttagcggctgttaagcagatttcgtgccagtttttaatttattgatttaaatggattttaaagagatgtgcactgtcaccgccgcagtgtcgacgtgtcatttcgacagcgttgacatcgtcacgccgtaacgcaaatcaagctggcaccgttattgcattgaaggggcaattcattaaggaggcgtcatgcacgaaatcaccctctgccagcgggcactggaacttatcgaacagcaggcagtgcaaaaccacgcgaaacgcgtcaccggcgtctggctgaaggtcggggcgttttcctgcgtcgagaccagcgccctcaccttctgttttgagctggtgtgccgcggcacgctggcggaagggtgcgagctgcatatcgacgagcagcaggcggagtgctggtgcgagcagtgtcagcagtacgtcacgctgctgtcatcgaaggtacagcgctgtccgcagtgccagagcagcgggctgcgcatcgtggcggatgacggtatgcagatccaacgcctcgaaatcgagaaggagtaatgtatgtgtagtacctgcggttgcgctgaaggcaacctgtatatagaaggggatgaacaccgtccccactccgcgtttcgctccgcacccttttctcctgccccgcgtcccgcggcggccctgaccggcatcacctttgccccgcagcgttccgacgcgggcgacctccattacggccacggcgaagcgggtacgcacgcgccgggcatcagccagcgccagatgctggaggtggagatcaacgtgctggacaagaataaccagctcgccgcccgcaatcgcgcccgctttgccgcgcgcgaacagctggtgctgaacctggtctccagccccggctccggtaaaaccacgctgctgaccgaaaccctcaaacggctgaataaacgcgtctcctgcgccgtgatcgaaggtgaccagcaaacggtaaacgacgcggcgcgcatccgcgaaaccggtacgcctgcgattcaggtcaataccgggaaagggtgccacctggacgcgcagatgattgccgacgccgccccgcgcctgccgctggcggataacggtatcctgtttattgaaaacgtcggcaacctggtttgcccggcaagcttcgacctcggcgagcggcataaagtggcggtgctctcggtgaccgaaggggaagacaagccgctgaaatatccgcatatgtttgccgccgcctccctcatgctgctgaacaaggtcgacctgctgccgtacctgaatttcgacgtggataagtgcctggcttacgcccgggaagtgaacccggacattgagatcctgctggtttccgccacgcgcggcgacgggatggacgcctggctgaactggctggagaacgaacgatgtgcataggcgtccccggacaaattcattccctcgacggcaatcaggccaaagtggaagtctgcggcatcctgcgcgatgtcgacctgacgctggtaggcagccacgatgagaccggcgcaacgcgtctcggccagtgggtgctggtccatgtgggttttgccatgagcgtgattaatgaggaagaagcccgcgacacgctggatgcgctacagaatatgttcgatgtcgagccggacgtgggcgccctgttgtatggggaggaacgttaacacatgcgttacgttgatgaatatcgcgcgccggagcaggtgttgcagcttatcgatcgcctgaaaacccgcgcgtcgctgctggactacacgaaagaaaaaccgctgcggatcatggaggtgtgcggcggacacacccacgccatctttaaatttggcctcgaccagctgctgccggagaacatcgagtttatccacggccccggctgcccggtgtgcgtgctgccgatggggcgcatcgacagctgtatcgacatcgccagccgccccggtgtgattttttgcacctttggcgacgccatgcgtgttccgggaaaaaatggctcgctgctccaggcgaaggcgcgcggcgcagacgtgcggatcgtctactcaccgatggatgccctgacgctggcgatggctaatcctgagcataaggtcgtctttttcgggctgggttttgaaaccaccatgcccgccaccgccattaccctccagcaggcgaaagcccgcaacgtcactaacttttactttttctgccagcacatcacgcttattcccacgctgcgcagcctgcttgaagcgccggataacggtatcgacgcgtttctggcgccgggccacgtcagcatggtgatcggcacagaagcctacagttttatcgctgaacagtacaatcgtccgttagtggtggctggtttcgagccacttgatctactgcaaggcgtgaccatgctggttgagcagaaaatagcggccctgagtgcggtggaaaatcagtatcgtcgcgtggtgcccgatgcaggtaacagacgggcacagcaggccatagccgacgtgtttagcgtcgaaggcgacagcgagtggcgcggactggggctgattgccgaatccggcgtgcacctgacgcccacgtatcgcgccttcgacgccgaagcgcatttccgcccgcagccgcagcaggtgtgcgacgatccccgcgcccgctgtggcgacgtactcaccggcaaatgcaaacctcatcactgcccgttatttggcaacgcctgtaacccgcaaaccgcgtttggcgcgctgatggtctcttccgaaggggcatgcgccgcgtggtatcactatcgcaaccaggagtgtgaagcatgaacacggtggaaatggcgcacggaagcggtggacaggcgatgcagcagctgattaaccggctgtttatggaagcctttaataacccctggctcgccgagcaggaagatcaggcgcgtattgacctcgcggccctgaccgcccacggtgacaggctggcgttctctaccgacagctacgtgattgacccgctgttcttcccgggaggcgatatcggcaagctcgccgtctgcggcacggcaaacgacgtcgccgtcagcggcgcgatcccccgctacctctcctgcgggtttatcctcgaagaagggttaccaatggagacgctcacggcggtggtcaacagcatggcgcacaccgcccgcgaggcgggaatcgccatcgtcaccggggataccaaggtggtgcagcgcggcgcggcggataagctcttcatcaacaccgccgggatgggggcgatccctgccgacattcactggggcgcgcagcagctttgcgcaggcgacttgctgattgtcagcggcacgctgggctgccacggggcaaccatcctgaacctgcgcgaaggcctggggctggatggcgagctgcgcagtgactgcgcggtactcacgccgctgatccagacgctgcgcgacatgccgggcgtaaaagccctgcgcgacgccacgcggggcggcgtgaatgccgtcgtgcacgagttcgcggcaagctgcggctgcgggattgagctgaccgagcgcggcctgcccgttaagccctccgtgcgcgggctgtgcgaactattagggctagacccgcttaactttgccaatgagggcaagctggtgatcggcgtggaacgcgcggcggcggaagccgtacttgcacagctgcgcgcgcatccattagggaaagacgcggccatcatcggcgacgtggttgagcgcaaaggggtgcgcctgaccgggctttacggcgtgaagcgcacgctggatctgccgcacgctgaaccgttaccccgaatttgctagaccgcgccaaaagcggtcagcgctgaatttctctttttgccagtttctattggaaagcaacaatgccgtatacaccgatgagcgatcttggacagcagggcctgtttgacatcacgcgcacacttttacaacagcccgatctcggcgcgctgagcgatgccctgacgcggctggtcaggcaatcagcgctggcggacagcgccgccattgtgctctggcatagcgcaacccaccgcgcgagctatttctcaacgcgtgataacggcaaaatcttcgaatatgaagatgaaacgtttctggcccacggcccggtgcggcgtatcctctcccgcccggaagcgctgcactgcaattttgaccagtttcgccaggcctggccgaagctggcagagagcaatctttaccacccgttcggccactacagcatgctgccgctggcggtggaagggcaaatttttggcggctgcgagtttatccgcgataccgaccagccctggagcgaggcggagtacgaacgcctgcacacctttacccagattgtggccgttgtcgcggagcagatccaaagccgcgtcaccaataacgtggactacgacctgctgagccgcgagcgcgataacttccgcattctggttgccatcaccaacgccgtgctctcccgcctggacatggatgagttggtcagcgaagtgtcaaaagagatccatcactattttaaaatcgatgccatcagcattgcgctacgcggcaaccggaaaggcaagctgaacatctactccacccactaccttgatgaagccaacccggcgcacgagcagagcgaagtggacgaagcgggaacgctgtccgagcgggtatttaaaagcaaagagatcctgctgctcaatctcaatgaacaggatccggtagccccctacgagcggatgttgttcaacacctggggcaacaagatccagaccctgtgcctgctgccgctgatgtccggcaacaccatgctcggcgtgcttaaactggcgcagtgcgatgaggccgtatttactaccgccaacctgaagctgctgcgccagatcgccgagcgtatctccattgcgctggataacgccctcgcctatcaggagatccaccgcctgaaggagcggctggtggacgaaaacctggcgctgaccgagcagctcaacaacgtggacagcgagtttggcgaaatcatcggacgcagcgatgccatgtacagcgtccttaagcaggtggaaatggtggcgcagagcgacagcacggtgctgatcctcggtgaaaccggtaccgggaaagagctgattgcccgggcgatccacaacctgagcaaccgcaatagccgccggatggtgaagatgaactgcgcggcgatgcctgcgggcttactggaaagcgacctgttcggccacgagcgcggcgcctttaccggcgccagcagccagcggctgggccgttttgaactggcggataaaagctcgttgttcctcgacgaagtgggcgatatgccgctggagcttcagcccaagctgctgcgcgttttgcaggagcaggagttcgagcgcctcggcagcaacaagctgatccagaccgacgtgcgtctgattgccgccaccaatcgcgatctgaaaaaaatggtcgccgaccgcgagtttcgcagcgatctttactatcgcctgaacgtcttcccgatctgcctgccgccgctgcgcgagcgcccggaagatattccgctgctggtgaaagcctttaccgcgaagattgcccgccggatggggcgaaatatcgacagtattcctgccgaaacgctacgcacactctcggcgatggagtggccggggaacgtgcgcgagctggaaaacgtcattgagcgcgcggtcctgctgacgcgcgggaacgtgctccagctctccctgccagaggttactctctctgaaacgaccgtgaccgcaaccgagcttgcgaaagagggagaagatgaatatcagctcattatgcgagtgctgaaggagaccaacggcgtggtagccggaccgaaaggtgcggcgcaacggctggggctgaagcgtaccaccctgctctcgcgcatgaagcgtctgggaatcgataaagagagcctgaattaacccgtcattccggcgacgtcgccctgcgcgtaatttgtcgcccactgcggcgcggagccggttattttttgggccgatacttttcgggtaattccggaaccggacggcgatcgtcgatcagatgacggatggtcagaatcggatggcgccataacatacgtggccctgcccagcgcatcacctgcttcatctcttcccgtcgggcgggttgataacagtgcacagggcactgtttgcaggcaggtttttcctcaccaaacacgcatttatccagccgcttatcggcataagccttgagcgccgaatagtgcccctcttcttttatggcgtgcggacacctgttttcgtacagggcgatcattctggcgatcgtctttttttctcgtgaaatacgtttaccggacataacgtcgtcctcaacaataaagtgcatttataatacccttttatccgcacattttcagtcattgcattccattttctgaagcgcccttccagaattaccccgccccccgctgcgttttactggtattttatacaggcataaataaccacctttgaccgcattcaccggagagcttatgcaagagatcgcgatcgccaaaccctatcgtcacttgaaagtgggttacttcagaaaacgtcatgaagaccgtaaaacgaaaattccaaaacggtacagcgtacacgctgcgctgagcctgaaaggcgactggcttgagcaagcgggatttaccaccaactcgcaggttcgggtgggcgtcgagcacggaaaaatcatcattgaattaatggcggaagatgcctcgtaaagtcgtgacttttttctgcgccgcacctttttttcatgcgacaatagaaggaacaatcggccattgagccgctcaaagcgtaatattttcaaagaaatggatatcataactccatgagcacaatcgacaatttcgacgcgcatacgccaatgatgcagcagtacctgaagctgaaggcccagcatccggaaattctgctgttttaccgtatgggcgatttttacgagcttttttatgacgatgcgaaacgtgcgtctcagctgctcgacatttccctgacgaaacgtggcgcgtcggcaggcgagcccatcccgatggcgggtatcccgcatcacgcggttgaaaactatctggcgaagctggtgaaccagggtgagtctgtcgctatctgcgaacaaattggcgacccggccacgtcgaaaggccccgttgagcgcaaggtcgtacgcatcgtgacgccgggaaccatcagcgatgaggccctgcttcaggagcgccaggataacctgctggcggcgatctggcaggacggtaaagggtttggctacgccacgctggatatcagctccggtcgttttcgcctgagtgaaccggctgaccgtgaaaccatggcggctgaactacagcgcaccaatccggcagaactgctttatgcagaggatttcgccgagacggcgctgattgaaggtcgccgcggcctgcgtcgtcgtccactgtgggagttcgaaattgataccgcgcgccagcagctgaacctgcaatttggcacgcgcgatttgattggctttggcgtagaaaatgccccgcgcgggctgtgtgccgcaggctgcctgttgcagtacgttaaggatacgcagcgtaccgccctgccccatatccgttccattaccatggagcgtcagcaggacagcatcatcatggatgccgccacccgccgcaacctggagatcactcagaacctcgctggcggcatggaaaatacgctggcgtcggttctcgacagcacggttacccccatgggcagccgtatgctcaaacgctggctgcatatgccgatccgcaataccgacacgctgatcggccgccagcaaaccattgccgcattgcaggatcgttacaccgacttgcagccggtgctgcgtcaggtgggtgatcttgagcgtatcctggcgcgcctggcactgcgcaccgcgcgtccacgcgatcttgcccgtatgcgtcacgcgttccagcagttgccggaactgcgcgcccagctgggagagatcgacagcgcgccagtgcagaagctgcgcgaaaccatgggcgaatttaccgagcttcgcgaactgctggaacgcgccatcattgatgcgccgcctgttctggtgcgggatggcggggttattgctccaggttataacgaagagctggacgaatggcgtgcgctggccgatggcgcgacggattatctggataagctggaaatccgcgagcgtgaacgtctggggctcgacaccctgaaagtcggctacaacgcggtacacggttactatatccagatcagccgtgggcagagccacctggccccgattcactatgttcgccgccagacgctgaaaaatgccgagcgctacattattcccgagctgaaagagtacgaagacaaagtgctcacgtcgaaaggtaaagcgctggcgctggagaaacagctgtatgacgagctgttcgacatcctgttgccgcacctggctgacctgcaactgagcgccgctgcgctggccgagctggatgtcctcgtaaatctggccgagcgcgccgacacgctgaattacacctgtccgacctttactgacaaacccggcattcgcattaccgaaggccgccacccggtggttgagcaggtgctgaacgagccgtttattgccaacccgttgaacctgtcaccgcagcgaagaatgctgatcattaccggccccaacatgggcggtaaaagcacctatatgcgccagacagcccttatcgcgctgctcgcctacatcggcagctacgttccggcgcagaaggttgagattggccctatcgaccgtatcttcacccgtgtgggtgcggcggacgatctggcgagcggtcgctctacctttatggtcgagatgaccgaaaccgccaacattctgcataacgcgacagagaacagtctggtgttgatggacgaagtaggacgcggtacctccacctatgacggcctgtccctggcctgggcgtgcgcggaaagtctggcaaataaaatcaaggcgctgacgctgttcgcaacgcactatttcgaactgacacagctgccagagaaaatggaaggcgtggctaacgtccaccttgatgcgcttgagcacggcgacaccatcgcctttatgcacacggtgcaggacggcgcggcaagcaagagttatggcctggccgtcgcggcgctggcgggcgtgccgaaagaggtgatcaagcgcgcgcgtcagaaactgcgtgagctggaaagtttgtcaccgaatgcggcggcgacgcagatagatggtacgcagatgtcactgctggcggtcccggaagagacctctccggccgtggaagcgctggaaaatctcgacccggattccctgacgccgcgacaggcgctggagtggatttatcggttgaagagtctggtttagttctctgcggtcttttttgccgggtgacggcttcgccttacccggcctacaaaacccgtaagcccggtaagcgtagcgccaccgggcaaaggaccgcacaatattatcgcccggtaagcgcagccgccaccgggctttttttacagcagcggcgggatcgtcggcacctgcggcgcctcatcaatatccttctgcgtcatgcggaacgcttccgggtaatgctcgcggctggtacggcgcagcggttcggtatcgcgccaggtatacagacagtgctgacactggtataccgtccagacacctttcaccggtgatgttgccatcacttcaatatgttcatcggcacaacgtggacaaatcattttttcctccttattgacgtgccgccagcatcgcggtcagtttttcggcccaggctttggtttcagggagatcctgtaccggctggctgtagtgaccacggttgtccggggcaacaggggtggtggcatcaatgatcagcttgtcagtgatccccgccgggctggagccggggtcaagctcgagcacagacatattcggtagctgcaccagatcgcctgccggattgaccttcgatgacagcgcccacatcacctgcggcaggttaaacggatcgacatcttcatccaccataatcaccatcttcacgtaacccagaccgtgtggcgtggtcatggcgcggagcccgaccgcacgggcaaaaccgccgtaacgctttttagtggagataatcgccagcagaccgtgggtgtacatggcgttcaccgcctgcacttccgggaattccgccttcagctgctgatagagcggtacgcaggtggcgggccccatcagataatcaatttcggtccacggcatgcccaggtagagagattcgaaaatcggtttagtgcggtaagaaactttgtcgatacgcacaaccgtcatgttgcgcccgccggagtagtgaccggtaaactcaccgaagggcccttcaatttcacgtttccggccttcaatcaccccttccaggatcacttccgacccccacggcacatcgaaaccggtcagcggagccgtcgcaatcggatacgggctttcacgtagcgcaccggccatctcatactcggattgatcgtatttcagcggcgtggcgcccatcagagtgatgatcggatcgttacccagcgtaatggcaattggcaggtcttcgccgcgctcttctgccttatgcagatgcaacgcaatatcgtgcatcggcaccggttgcaggccgagcttacgcttgcccttcacttccatacgatagatcccgacgttctgcttgccgaagtgatcggggtcgagcggatcgcgggagacaacgcatgctttatcgagataaaagcccccgtcaccgtcgttcaggcggaacagcggcagaatgtcgaacaggttaatgtcttccccgtccaccgtgttctgcgcccaggccgggtttgcacgacgctctggagcgacgggaaatttgtcccagcgacgaataaactcgtcgatctgttttttcaccggggtattcgccggcagccccatcgaaatagcgtggttttgccacgagccgatagtgttcatcaccacacgggcatcggtgaaaccgcgaatattatcgaaccacagcgcaggcgcgccatcgccaatgcgcccggtagcgttggcggccgccgctaaatccggctcagcgtttacctcttcctcaattttcagcagctgcccttgctcatcgagcgcctgcaagaagcttctcaaatcatcaaatgccatctttattctcctgtgaaaaatgtttcgctgcctgcaaaccttcccagcgccgggcttttttatgctccagaccgaactggtcgagaacgcgggtcacgatatgctgggtaatgtcatcggcggtttgcgggtggttgtagtacgcaggcataggcggcaccatcgccacgcccatgcgggaaagggcaagcatgttctcgagatggatggtgctgagcggcgtctcacggggaaccagcaccagcttgcgtccctctttcagcaccacgtctgccgcacgccctaccagcccttcggcgtagcccgcgcggatacccgccagcgttttcatgctgcacgggatgacgatcatgccgtcggtgcgaaacgagccggaggagatggtggcagcctgatcggccgggctatggacgacatccgccagggcagcaacgtcatgcgcagtgaagggcgtttccagctcaatcgtggtttttgcccacttcgacatcaccagatgcgtttccacctccggcatttcccgcagcgcctgcaacaacgccacgcctaatggcgcacccgttgcgcccgtcattcccacaatcaatctcattcagcacctcaattagtttgttcgtatacgaacatattaattaaactacgccttgatcctgctgctgacaagattgttcgcatacgatcacactaatcgctaaaaaactctcgcgttaaaattcagcccgagagcggctatcatagagggagtatttttccgtcggagtgtccatggagttaagacaagaagctttccacctgctacgtcagctttttcaacagcataccgcccagtggcagcacgcattgcccgaactgacaaagccacagtatgcggtgatgcggtcaattgctgaaaatcctggcattgagcaggttgccctgactgaagtcgcggtgagcaccaaagcgacgctggcagaaatgctgagccgcatggaagcacgcggcctggtcaggcgcgagcacgatccggcggacaagcgccgtcggtttgtctttctgacggccgaaggtgaggccctgcttgagagcagtaaaccgattggaaatgaggtggatgaggcgtttttagggcgccttaacggcgcggaacgagagcaattttcagcgctcattaaaaagatgatgcaggattaagtaaccctgacgcgcataaaatcaataaatgttcgcactttcgcgggcacatgccgggcatcaggataaacggcatagatgccctgctgagcgaacgtgtacgccggtaacagcgagaccagttcccctgcatccagtgcgtttcgcaccagccactccggcagcagcgccactccacatcccgcgagggcaaaagccatcagcgcctgggcgctgtctgcatacaggcgcggcgctttcttgatctcaaaggaaaccggctgcccatcaacgcctctcatctgccagcgcagcggcgaggttaaacgctcgtgaatgatccagtccgcttccgccagctgctccagcgagtcaaccggatggtttgccagccagcctggcgttgccacgggcaggatggtgaaggaggtcatcaacgcggcgtggtagcgcgaatctgcaagcgtgccgagccggatagcgacatcgaagcgctcggcgataagatcggcatgcaaagaggacgagacatgccgcacgcgaaggtccgggtgcagctggctaaattcagccagcaaaggcaccaccacctgcgagccatattcgggcgtggtggtgatccgcagttctcccgtcagcccggcgtggttggcgcgaacgtcatcctgcaatcgctctgcatcccgtaacagcatcacgcttcgttgatgaaagagcttccccgcctcggtcagcgtcaggcgtcgggtggttcgcagcaacagggtgacgcccagctcctcttcaagctgacgaatatgaaagctgaccaccgcttttgtcagccccatcgcctccgctgcggcggtgaaactgccggtgtccgctacggcgataaacatcgccgtacgctgtaaattaagcatcgcttgcctggttaactgtcaaaataatgttgacagtatatcgtgctttgtcgcgtttatccgtaacgcgcgggccgatacgatacgccacctcaccggaggaacttccatgacgtatcgcagcaaaatcgccgtcgtctttctgctcggctttttccttgatttgataaacatgtttattgccagcgtcgcctttccggcgatggctcgcgctttcaataccacaccttccgcgcttacctgggtaagtaacggatacattgccggactgacgttagtcatccctttcagcagtatcctgacgcgccgcgtcgggccgaaacgcgttatcctgctctcactgcttctctttagcgcggcctccgttgcggcgggtctctcctcttcgctggaaagtctgattgcctggcgagtcgtacagggcgccggagggggtttactgatcccggttggtcaggcgctgacctggcaacagtttaagccttatgagcgggccagactctcctcggcggtgatgctggtcgcgctgcttgcccccgcctgctcaccggctgtgggcggcatgctggttcagacattcagctggcgctggatattttttgccaccctccccgtcgccattgtcacctttgctttggcctgcgcgtggcttaaaacagaaccgtcgccgataacccccaccagaacagtaaacctgtctttgctgacggatccgctgttgcgtttatccatgcttatctatgtgtgcgtacccggcatctttattggcgtgaacgtaacgggcatgtattacctccagagcgaggccaatatgacacccgccgcaacgggcatgcttatgctgccgtggtctgtggcttcgtttttggctatcaccgcgacaggacgctatttcaaccgtatcggcccccggcctctggtggtcatcggttgccttttgcaggcgacgggcattctgcttttagttaacgtcggcccggcaatgctgctacctgccgttgcgtttgcgttgatgggcgcggggggaagcctttgcagcagtacggctcagagcaacgcgtttttgacgatgcgaccggaagatatgcccgatgccagcgcgctatggaatctgaatcgtcagttgagcttttttgcgggcgctctgctgctggcgcaggcgctgagcttcatgcaggattatctcgcaccgctggccgcctggcacgggatgtttgtttttgccgctgtcatcaccctgctgcccgtactgtacgtctaccgtcttaacaacacgcagttacttgcgcaactgcaacaggagcaaccatgacccatttcgaacaagagatcctcgacattcacgtcgcccttgaaaactggttaggtgcaggcgaaggcgatcgggacgccctgctcgcccgtttccgtccggattttctgatggttccaccgagtggcaaccctttagatcatcacgcgcttgcccaatttttatatgcgcagcggggaacccgaccggggctcaggatcgacattgatgcgttaacaacgcttcagacatgggacaacggcgcagtgctccattaccgggagacgcaaacccggccaggccagcccgtcaacgtgcgctggtcaaccgcagtgcttaatcaggaaggggataacatcacctggcgtttgctgcacgaaacggcgcagccgtaagacataaaaaaggcccgtctcacgacgggccttttctgacgaatggttgcttactcgcggaacagcgcttcgatattcagaccttgcccttgcaggatttcacgcaggcgacgtagtccttcaacctgaatctgacgaacacgttcacgggtcaggccaatctcacgaccgacgtcttccagtgtcgcagcttcataccccagtaaaccgaaacgacgtgccagcacttcacgctgtttggcgttcagttcgaacaaccatttgacgatgctctgtttcatgtcatcgtcctgcgtggtgtcttccgggccgttgtctttttcatcggccaggatgtccagcagcgctttttcggagtcgccacccagcggggtgtcaaccgaggtaatgcgctcgttgagacgcagcatacggcttacgtcatcaaccggtttgtcgagttgctctgcaatctcttccgcacttggctcgtggtccagtttatgggacaactcgcgcgcggtacgcagataaacattcaactctttgacgatgtggatcggcagtcggatcgtacgggtctggttcataatagcccgttcgatggtctgacgaatccaccaggtcgcgtaggttgagaaacggaacccgcgttccgggtcaaacttctcaactgcgcggatgagacctaagttgccctcttcaatcagatccagcagagccagaccacgattgccgtaacggcgggcaattttcacgaccagtcgcaggttactttcgatcatgcgacgacgcgaggcaacatcaccacgcaaagcacgacgtgcgaaatagacttcttcttcggccgttagcagtggggagtaaccaatctccccaaggtaaagctgagtcgcgtccagcacacgctgtgtggcaccctgcgataacagctcttcttcagccaaatcgttatcactgggttcctcttctactaaggctttttcgtcaaaagcctctgctccgttctcatcaaattccgcgtcttcatttaaatcatgaactttcagcgtattctgactcataaggtggctcctacccgtgatccctggacgagacaccctggctggcatgtcccatcaatttatcgctgcggtaaatattgcagcgggtttacggatttccccttgtaacgaatttcaaaatgcaagcgtgtagaactggttccggtgctacccatggtagcgattttttgccccgccttaacttcttgttgttcccggaccagcatagtgtcgttatgggcgtaggcactcaggtaatcatcattatgtttgatgataataagattaccgtaaccgcgcagtgcgttaccggcatagacaacgcgcccgtctgcggtcgcgatgattgcctgtcctttactgcctgcgatatcgatccctttgttgcccccctcagaggtagcgaagttctcgataatcttgccgtcagttggccagcgccaggtggtgattgacgagctggcattctgactgcttgcagtcggtacagtagagctaaccacaggtgccgtagtcggtgctgtgacaacagtcgcagtacctttattattcggcaacattttgttagcactctgatcacctgaatcctcagaatacgtaattacaggttgtgaagcaaccaccgtggtggttttttgtgcaggggtgacgctgttattttgcgcagttacgtcggccgctgaaacggtgttgcctggcgtaagcggtgtccccgtcgcgttgccaacctgaagcgtttgcccgacttccagaccatacggggcctggacgttgtttcgttgtgccagatcgcggaaatcgttcccggtgatccaggcaatatagaacagcgtatcgccgcgcttcacggtataggtgctgccgccggtatagctacctttcggaatgttcccatacttacgattatacactatgcggccattttcggtctgaacaggctgatccactggctgaatctgcgaaggctgcgtaactggacgctgaaccggctggatctgcggagtttgctgcgccgtggacgtgcccattttaggcggaggggtaatcaacattccgctggacgtgttacccgagccgctggttccattgacggaactgacgggcgcaggtgcattgtcagaacttgtacagcctgccagccagagcgaaaccagtgataatgccgcaacacggctgatggtgaattttgggcttcccgcgctcatttatcccccaggaatgtgttaactaccagtgacttaaaaataaccgtgatggcacgaacctatcgcgccacaccatacgctgaatttgcctcaataaccctggaaaaatccgagtctcaggccagctcgcccttaaccaggggcacaaagcgcacggcttccacggtatcgataataaactcgccgccgcgtcgacgaacgcgctttaaaagctgctgctcatcgcctacgggcaaaaccagaatgccgccctcgtccagctgcgagagaagtgcagcggggatttcaggtggcgctgccgtgacaatgatggcgtcaaacggggcgcgagcctgccaaccctgccatccatcgccgtggcgtgtcgatacattatgtaaatcaagctgtttcaggcgacggcgcgcctgccactgcaagcctttaatccgttccacggaacagacatggtgcacaaggtgggccaggatcgcggtctgataccctgaaccggtgccaatttccagcacgcgggagtctggcgttaactccagaagctccgtcatacgcgccaccatgtaaggctgcgaaatcgtctggccttgcccgatgggcagcgccacgttttcccacgctttgtgttcaaacgcctcatctacaaacttctcacggggaacctgggcaagcgcatccagcacctgctcgttggcgatcccctgtgcgcgtaattgttccagaagagtttgtacacgtttacttaccattgcgcgttcactccgacccgatctaaccagtccgacaccacatcatgcgcgctataagcggttaaatctacgtgcaacggcgtaacggaaacgtaaccctcatccaccgcagcgaagtcggtgtctggcccggcatcgcatttatctcccggcgggccgatccagtacagggtattgccgcgcggatcctgctggggaataacctgatcggcaggatggcgactgccgcagcgcgtcacgcggatccctttaatctcgtccagcgggagatccggcacgttaatattgaggatacgtccggtacgcagcggctcgcggccaagcgcacggagaatggagcaggtcaccgcagcggcagtgtcatagtgggtgtggccgtttagcgagaccgccagcgccgggaaacccaggtgacgcccctccatcgccgcggccacggtgccggagtaaatcacatcatcgccaagatttggcccggcattgatgccggagaccacaacatccggccgcgggcgcatcagcgcatttacgcccagaaacacgcagtcggtcggcgtccccatctggacggcaatatcgccattctcaaaggtaaaggtgcgaagtgaagactccagcgtcaatgagttagacgcgccactgcggttacgatcgggagccacgacctgcacatccgcaaattcgcggaggtgtttcgccagcgtctgaatacctggcgcatggatcccgtcatcgttactcagcaatattcgcataatcacccgacgtgttgataagttccctgacaacactggtggcaaagctacctgccggcagccagaagcgtaactcgacggttacgtcatcccaccagttccagctcagctgttgcgggtagaggagcatcgcacggcgcgccgcctcgactttttcccgcaccagcaatgattgtaattctggcgcatccgccaccgctgactgctcagcggccagcgcctcgccctgagttccccagtcgcctgagcccggcaaggcggcggtaatcatcagcgctttagcgtccacgcgcgactgggcatcggccatctcatcggccgttgccacaaaccagcttccgcgtcccgctaattgtagcgcatcgccgacaacaacttgattcgcgtccggttttttcagccgttcgctcacaatctgattaaacaacgcactgcgggctgccgacaaccaaaaaactgcgtttattcctgtcgcgcaccggcgcgctgctttgcgcccagcgcagcgcgcccagcaggttgctgccaccaatgccaaagcgctgtgcgccaaaatagtttggcacgccgcgttcggtaatggccttcaggcgtttttcaacgtcatcgcggtcggccacttcacgcagcactagcgtgaaatcgttgcctttcaacgctcccggacgcaatttgcgtttgtggcgggcatactccagtaccttacagccctcaagctcaaatttgcttaaatcgggcatggcattgccgggcacgcgggcgcaaagccactgttcggtcacggcatgcttatccttttgaccggcaaagctcacctcgcgggcgtgaattttgaggaattttgccagcgcgtccgccacgaagcgggtgttgcagccgtttttcagaatgcgcaccaggatgtgctcgccttcgccgtccggctcaaaacccagatcttccactaccacgaaatcttcagggttggctttcagcagacccttgccctgcggtttaccgtgcagatacgtcaggttgtcgaaatccgtcatttgaccgccttcaccagcagcgccacggcttcacaggcaatgccttcgccacgaccggtaaagcccagcttctccgtggtggtcgctttgacgttgacgtcgtccatatggcagcccagatcttcagcgataaacacgcgcatctgagggatgtgcggcagcatcttcggtgcctgagcaatgatcgtcacatcaacgttgccgagggtgtagcctttggcctgaatacgacgccaggcttcgcgcagcagttcgcggctgtctgcgcctttaaaagcaggatcggtgtccgggaacagtttaccaatgtcgcccaacgcggcggcacccagcagcgcgtcggtcagcgcatgcagcgccacgtcgccatcagaatgcgccagcaaacctttttcgtatggaatgcgcacgccgccaatgataattgggccaacgccgccaaaggcgtgtacatcaaaaccgtgtccaatacgcattatgccttctcctgagaggtcgtacgggtaagataaaattccgcgagctgtaagtcttccgggcgcgtcacttttatattatcagcgcgtccttcaacaagcgttgggtggaaaccgcaatactccagcgccgaggcttcgtccgtaatggtcgcaccttctttaagcgcacgcgttaagcagtcgtggagtaattggaggggaaaaaattgtggcgtcagcgcgtgccataaatccacgcgctcgacggtgtgggcaatcgccggtttacccggttcggcacgcttcatggtgtcacgcaccggggcggccagaatgccgcccacgttactggtttcactcagggccagcagacgtgacagatcgtcgtgatgcagacagggacgcgcggcatcgtgcaccagcacccactgcgcgttcccggcagcctgaatgcccgccagaacagagtcggcccgctcggcgccgccgtcaacaacggtaatctggggatgatgtgccagcgggagctgcgcaaaacgcgcatcgccggggctgatggcaataaccacgcgtttcacccgggcatgcgccagcagcgctgccacggcgtgctcgaggatcgttttatcaccaattgagaggtactgcttgggacactctgtctgcatgcgccggccaaaacctgcggccggcaccacggcacagacgtccgaaaaagttgctgccatgtcgtaatcctgggcctgattatcgattgttttgtgcggagccctgattgcgtttagacgcatccggaaccaggcgataaaacgtttcgcccggcttagtcatactgagttcattgcgtgcgcgctcctcaatcgcctcctggccgccattgaggtcatcaatttcagcaaaaagttgatcgttacgcgctttaagtttggcgtttgtcgcctgctgtgccgcgacgtcatcgctcacccggctgtagtcgtgcagtccgtttttgccgaaccacagcgaatattgcagccagaccagcaaagccagcaacagcagcgttagtttacccatcctgccccctgaaaaaacggcatcatcatcccataactttccgctggactctactgcggggttttaattatgccgtaagttagcccatcagccataaaaacagcaggccaaagatgaccacaacggtggcgatagtgatgagcgtactatacaggagcttgccgttgaaaagggagtgcagcgccacgcccacaaccaccgcaacgggcatcagcgccagaaagaaaggccaggtatagaggaagaaaaagagggtgttaccaccgtagatcaaaaacgggatacccagcgccagtagccacgatacgaagccgactatcgccccagggaaggaccaggtcgtttcgtcgtcggtcgttaacggttccgacccggtggtaatcatgtagttttcactgttgcgcatagctaatcctgtgaccgtgactcatcgctcgggaagacagctcccgaacgataccgtctcaggatctgataatatcgtcccgtctgagcaggtctaataattggcttactaaatttgttaccaattgttggccttccagatgaatctcaggggattcaggcgcttcgtaaaccgagtcaatgccggtgaagtttcgcagctctcccgcgcgggcttttttgtacagcccttttggatcgcgcgcttcgcagattgccagcggggtatccacaaacacttcaataaagcgattctgcccaacgcgctcacgcaccatctgacgttcggcgcggtgcggtgagataaacgccgttagcaccaccagcccggcatccgccatcaggctggcgacttcccctacccgacgaatgttctctttacggtcttcatcgctgaaccctaaatcgctgcacaggccgtgacgcacgttgtcgccgtccagcaggtaggtgctcaccccctgctgatgcagcgcctcttccagtgcgcctgccaccgtggatttaccggagccagacagcccggtaaaccacagcacaaccccacggtgaccgtggagctgttcgcgctgggcgacggtgaccggatgaggatgccagacgacgttctcatcatgggcggccatcacttgcctcccagcagatcgcgtgcgccccagtgcgggaagtgcttacgcaccagcgcgttcagttccagctcgaaggcgctgaactcagacgtcacgctcgcctgtgcgtcaggctcgcggaccatgccggcaccgacggtgacgttggtcaggcggtcaatgaagatcagcccgcccgtcaccggattctgctgatacggatccagcaccagcggctcgtcgaaggtcatatccaccagaccgatgccgttcagcggcagctcgctcacgtcacggtgggtcaggttgttgatgtccacctggaactgaatgccgtccacgcgggcgcgggttttcttgccggcgattttaatgtcatagctctggcctgcggtcagcggctgttcggccatccacactacatccacggatgcgccctgcaccgccgccagcgtttcctgagcgtcgaccagcaggtcgccgcggctgatatcaatttcgtctttcagtaccagggttaccgcttcacctgccccggcttcgtccagatcgccatcaaaggtgacgatacgggcgatggtcgattccacgccggatggcagcaccttgacgcgctgacccaccttcacggagcctgaagcgagagtaccggagaagccgcggaaatcgaggttcggacggttcacgtactgcaccgggaagcgcatcggctgggtatcgaccacgcgctgaatttcaacggtttccagcacttccagcagcgtcgggccgctgtaccacggcatgttcgcgctctgagaggcgacgttatccccttccagcgccgacagcggcacaaagcgaatatcgaggttgcccggcagctgttcagcaaaggtcaggtagctctggcggatctcgtcgaaacgcgcttcgctgtagtccaccagatccattttgttcaccgccaccaccagatgcttgatccccagcagcgtagagataaaactgtgacgacgagtctgatccagcacacctttacgggcgtcgatcagcaggatcgccaggtcacaggtggacgcgccggtcgccatgttacgggtgtactgctcgtgccccggggtgtcggcgataataaatttgcgcttttcggtagagaagtagcgataggcgacatcaatggtaatgccctgctcgcgctccgcctgcaagccgtccaccagcagcgccaggtcgagtttttcgccctgggtgccgtggcgtttgctgtcattgtgcagggaagagagctgatcttcgtagatctggcgcgtgtcgtgcagcagacgaccaatcagggtacttttcccgtcatccacgctgccgcaggtcaggaaacgcagcaggcttttgtactgttgggcgtgcagataagcttctacgccgccttcatcggcaatttgttgggcaatagtcgtattcatggcggctccttagaaataaccctgacgtttcttcagctccatggagcctgcctggtcgcggtcaatcacgcggccctgtcgctcactggtggtcgacaccagcatctcctcgatgatctcgggcagcgtctgcgcactggattccaccgcgccggtcaacggccagcagccgagagtacggaaacggaccatctgttttttgatcacttcgcccggctgtaaatcaatgcgatcgtcgtcgatcatcatcagcatgccgtcgcgctccagcaccgggcgctcggccgccagatacagcggaacgatctcaatattttccagatagatgtactgccagatatccagctcggtccagttggagagcgggaagacgcgaatgctttcgcccttgttgatctggccgttgtagttgtgccacagctccggacgctggtttttcgggtcccagcggtggaagcggtcgcggaaagagtagatacgctctttggcgcgggatttctcttcgtcacgtcgcgcgccgccgaaggccgcatcaaaaccgtatttattcagcgcctgcttcagcccttcggttttcatgatgtcggtatgcttggcgctgccgtgcacgaacgggttgatgcccatcgccaccccttccgggtttttgtgcaccagcagctcgcagccgtaggctttggcggtacggtcacgaaactcgtacatctcgcggaatttccagccggtatccacgtgcagcagcgggaacggcagcgtacccggataaaacgctttacgcgccaggtgcagcatgacgctggaatctttaccgatggagtacatcatcaccgggttagaaaactcggcggccacttcgcggataatgtggatactttccgcttcgagctgccgcaggtgagtaagtcgtttttggtccataaccgttccttaagccaaatttataacagaagcgccaaagccttctgtgtcggttgtgtgttggaaccaggcgagcgtgctgtgcagctgcaccacttctcccaccacaatcagggcgggcattggggcgtctttcgccagggttgcaaggtcttgtaaggtgccgatggcgacatgctgatcgacgcgtgtcccgcgggagatcaccgctaccggcgtcgtcgcatcgcgaccgtgctgaataagctgttcgctgatgtctgccgctttcatcgtgcccatataaatcgccagcgtttgtcggctctgggcgagatgcgaccagtcaaacggcgtgctgtcggctttatagtgccctgtcacaaaggtcacgctctgggcgtaatcgcgatgggtcagcggaataccggcgtaggccgtgacggcagacgccgccgtaatgccggggaccacctggaacgggacgcccgcttcggctgccgcctgcaactcctcgccaccacgaccgaagataaacgggtcgcctcctttcaggcgcaccacggtcttgcccgctttcgcggcggcaatcagcatctggttggtgtcgtgctggggcacggagtgctcgccggcacgtttgccgacgcaaatttgctccgcgtcacggcggatcagctcgcgaataccgtcggtgaccaggtggtcatagaacacgacatccgcatcctgaagaacctggaggccacgcagcgtgagcagcccggcatcgcccggcccggcgcccaccagaatgatctctccgcccgtactgccggggttatccagttcgtcttcgagaatttgttgcgccgccgtctcgttaccggcctgcatcaggctggcaaagcggccgcgaaacacacgctcccagaagcgacggcgttccgtcacgctggtcagacgcgttttcaactggttgcgccagtagctggccttctccgccatgcgtccgaggctggtcggcagcagcgcttcgattttttctctcagcacgcgcgccagcaccggggcggtgccgccggaggagatcgctaccagcagcggcgagcggtcgacaatcgacgggaagataaatgaacataacggctggtcgtctaccacgttcaccagacggtgacgggcctgagctgcgtcggagatgcggcggttgagcgcccgatcttcggttgccgcaatcaccagcaccacgctgtcgatctgagactcttcaaaatccgcctctgcaacgatctgcacctgcgccccggcgcgttgcaggaaggcgattttgcgatcggcaatttcacccgtcccgacaaccagtaccggtcggtcttttaaggcagcaaaaagggggagatagtccacaggcaacaactcactaacaaccacgaataaagggactatagggggcggcttagatcgaatgaaattacgaattggaatgagtagttactcaatggaataacgccgtggaaaagcaaatatcaaaaagtgcttaacacgcgaaatttcgggcatttaggagcaattcaaattgtgtctacccgatcacagtttcatactatgcgggttaaaattttgctctgtttttaaggactcactatgttttccgcaatgcgccaccgattcgttgccctggcgctcggcgtttgctttatccttccggctcaggcaaaaaatcaatcttacggtgaaatagccagtatgcaggcgcggcatattgcgacggtctttccgggccgtatgaccggaaccccagccgagatgctctcggcagactatatccgtcagcaatttgcggatatgggctatgagagcgacattcgcgctttccacagccgctacatctataccacacgcaataaaacgcaaaactggcataacgtaaccggcagcacggttattgcggcgcacgaaggaaaggcggctgagcagattattattatggcgcaccttgatacctacacgccgttgagcgacgccgatgtcgataataacctcggcgggctgacgcttcagggactggatgataatgcggcggggctgggcgtgatgcttgagctggccgaacgcctgaagaatattccgacgaaatacagcattcgctttgttgcgaccagcggcgaagaagaaggaaaactcggagctgagaatctccttaagcgcatgagcgctgaggagaagaaaaatacgttgctggtgattaacctcgataatctgatcgtgggggataagctctattttaatagcggacagagcacaccgagcagcgtacgtaaactcacccgcgaccgcgcgctggcgcttgcccgcacgcatggcgtctatgccgcgacaaatccgggcggtaacccgcagtatcctaaaggcacaggctgctgtaatgacggtgaagtgtttgataaagcgggcattccggtgctgtacgtcgaggcgacgaactgggcgctgggcaaaaaagatggctatcagcagcgcagcaaatcgaaagcctttccggacgggaccagctggcatgatgtgcggctggataatcagcagcacattgataaagcgctgccgcagcggattgagcaccgcagccgggatgtcgtgaaagtgatgctgccgctggtgaaggagctggcgaaagcagggaaagcctgatgtcgttaagcccggtggcggctacgccttaccgggcctacgttttgtgccgttgtaggcccggtaagcgcagcgccaccgggcgaaaaaacattacccttcgtgcagcccgcactcgcgcttcagcccaaagaatcgcgtctcttcttccgccattcccggttcccatttacgcgtggtgtgggtgtcgcctaccgacaggtagccttgatcccacagcggatggtacttcagcccgtgcttttgcagatactggtacaccgtgcggttatcccagtcgatgatcggcagcactttgaacacgccgcgctgcaccgccagcaccggcagcgttgcccggctcccggactgctcgcggcgcaggcccgcgaaccaggtctgagcgttcaactctttcagcgcccggttcatcggctcgaccttgttgatctcattgtatttctcaatgccctcaacgccctgttcccacagcttgccgtagcgcgcctcctgccaggccgcgctttccgtcgcgcggtaaactttgaggttcagcttgagcttgtccgtcagctcgtcaataaactggtaggtctccgggaacagatagccggtatcggtgaggatcaccggaatgtccgggcggagccgattcaccaggtgcaggctgaccgccgcctggatgccaaagcttgacgacagcacatagtcacccggcaggttttccagcgcccacgccacgcgcccttcggcgtcgagtttttccagctgggcgttggtttctgccagggccagaatgcgttcgacttttggcaggtcattaagggcgtttagatcgagtacggacataagaacctcgtttgcctgttttgccgggcggcactgcgtttgcccggcctacaaaacccgtaggcccggtaagcgaagcgccaccgggcaaaggatgcgttactcccagaaatccctggcgggatcgagcaccgggcgaatgatgcccgcacgcaccgtaaagtcgccgaagccttcacccgcttcacgctctttcgcccagcgcccgacaagctcgtcgatggaatcaagaatttccggttccgtaatattttcacggtacatacgcggaatgcgcgtccccatacggttgccgccaaggtgcacgttgtaacgacccggcgctttgcccaccagacccagctcggccagcatcgcgcgaccgcagccgttcgggcagccggtgacgcgcataacaatatgctcgtccggaataccgtgtttttccagaatcgcttccactttatcagtgaaggacggcaggaaacgttccgcttcggccatcgccagcgggcaggtcgggaacgacacgcaggccatcgagttttcacgctgcggtttaaccgcattcatcaacccatgatcgcgcgccagcttctcgatcttcgccttctggctttccggcacgccggcaataatcaggttctggttggcggtaatgcggaactcgcctttatggatcttcgcaatttccagcagaccggttttcagcgggcggcccggataatccagaatacgaccgttttcaataaacagcgtcaggtgccatttattgtcgatgcccttaacccagccaatgcgatcgccgcgaccggtgaattcgtaagggcggatcggctcaaacttgatccccgcgcgacgctccacttcttctttgaacgtctcgacgcccacgcgctccagggtgtatttggttttcgcgtttttacggtcggtacggttgccccagtcgcgctgggtagtaaccaccgcctcagccacggccagagtgtgctccagcggcaggaagccgaactcgctcgcggtgcgggcgtaggttttcttgttcccatgctcgatggacaaaccgccgcccaccagcaggttaaagccgaccagcttgccattttcggcaatcgccacgaagttcatgtcgttggcgtgcaggtcgatatcgttctgcggcgggataaccaccgtggtcttgaatttgcgcggcaggtaggtctgaccgaggatcggctcttcgtccgtggtcgcgactttctcctgatcgagccagatctccgcataggcacgcgtgcgtggcagcaggtgctcggagatcttcttcgcccactcgtacgcttcggcgtgcagctcggactcatacgggttcgaggtgcaaagcacgttacggttcatgtcgttggcggtcgccagcgcgtccagccccacggagtgcagcatctggtgcaccggcttgacgttcttcttcagaatgccgtggaactggaaggtctgacggttagtcagacggatgctgccgtaaatcgtgttttcaccggcaaacttgtcaatcgcctgccactgtttggtggtgatgatgccacccggcaggcggcagcgcagcagcatcgcatgacgcggctccagcttctgttcggcacgttcggcgcggatatcgcggtcgtcctgctggtacataccgtggaaacggatcagcaggaagttgtcgcctttgaaaccgccggtcaggccgtcatttaaatcttcggcaatggtaccgcgcaggtagttgctctctaccttcatgcgctcggcatcagacagtttgccttcgaccaccagtgggccaggatgtttttcgctcattagtagacatctcgctgataacggcgctctacgcgcagctcacttaaaaattcatccgccgcttcggcatccataccgccgaattcggcaatcacttccagcagtgcctgctcaacgtctttcgccatgcgattggcgtcgccgcagacataaatgtgggcgccgtcattgatccagcgccacagctctgcgccctgttcgcgcagtttgtcttgtacgtatactttttctttctgatcgcgggaccaggccagatcgatgcgggtcagcacgccctctttgacgtagcgctgccattcaacctggtagaggaaatcttcagtaaaatgcgggttgccgaagaacagccagtttttacccggcgcctcgtccgctgcacgctgctgcataaaggcgcggaacggtgcgatgccggtgcccgggccaatcatgatcaccggcgtttccgggtttgccggcaggcggaagttgtcgttgtgttcgataaagacgcgcacctcgccctcttcttccacgcggtcggccaggaagcccgacgccccgcccgcccgcgcgcggccttcgatgtcgtaacgcaccacgccaacggtgatgtggacttcgttttccacttccgcctgtgaagaggcgatggagtaaagacgcggcgtcagcggacgcagcaggccgatcagcgcgtcggcatccagctgtgccggggagaaacgcaccatgtcgacaatcggcgtcgtcgcggcgtaatgctgtaacttcgtcttgtcccccaccagcggcagaagggactcgctgcgcgttaaggtggcgtagttttcaacgatattggcggtgttcaccgtcagctcgaaatgccactgaagcgcctcagagagcggtaaggttttaccttccacctggaccggctccgtgcctttcagccacagcagctcgaccagctctttcaccagcgccggatcgttctgataccagacgcccagcgcatcgccaggctgataacgcaggccggagtcaccgagatcgatttcgatatggcgcacgtctttttccgaatcacggcccgtgattttctggtttaccgacaggctcgccgtcagcggcgcctctttcgtgtaagggctggtgtggatttcgttgacggtgcccgctgcggtaacggcggcttgcgctggcgtctctttcgggacgcgggccttcagcacctcaacgatgcgcgtccgccattcggcggcggcggcctggtattcgacatcagcgtctacgcgatccagcaggcgctctgcacccagctccgccagcttgctgtcgaagtctttaccggactggcagaaaaattcataggacgtatcaccgaggccgaagacggcaaaggcggtgccctccagcctgggcgcttttttcgagaacaggaacttatgcagcgcgacggcttcttccgcaggctcaccttccccctgcgttgacgccaccaccaccaacagtttttctgacgcgatctgtttgaatttataatccccggcgttgaccaggttgacgttcaacttcgcggcgagcaggtcatcacgcagcgcttcggccacacgacgggcattacccgtttgcgaagcggagataagcgtgatggcaggaatttcaacggccgttggcgggacgccagccacagcacccggctgctgattgagcattccccagaaatagccggagacccaggcgagctgggtgggtgaaaaatcggaagtcgcggcctggaggcgcgccagttgctccgggttaaggggaagcaaatttgaaggtggggcctgtgttgtcatgcgtcgttatgttccagtagcaaagcggactttaagcgaataaatccaaactgaagataaggttaacggcggggataataacaattaaagaagggatggaaataataaataaccaaatggactaacctgttttagttatcgttcttaacgataaaagcgattaaataactatctgaaataaaacaataaaggccgataaacaccatgaatacgaggcggtgaccgttcaaagccgttttagttaatgataaaaattgtgctttccggtactatgcggcggttttttccgcattcctgagagctatgatgtccaccacactgtttaaagatttcaccttcgaagccgcacaccaccttccacacgttcctgccgggcacaaatgtggccgcctgcatggacactcgtttatggtgcgtcttgaaatcaccggtgaagtcgatccccatacgggctggatcatggactttgccgaactgaaggctgcgtttaagccgacctacgatcgtctcgatcactactacctgaatgatattccgggccttgaaaacccgaccagcgaagtgctggcgaaatggatttgggatcagatgaaaccgctggtgccgctgctgagcgcggtgatgatcaaagagacctgcacggcaggctgcgtctaccgcggggagtgaatctcctccgttgcggcctcacgaggcacgagcggcgtaaactcgtagagcaccagcgcattactctccagtgattcactcagttgccagccgtcataaaggcgttcatcgcgtacggaaagcgttggacgcgctttatgcgctatccagcgccacatctcttcatcagggccgctttcgctgccaaccccttcaagtaacggatagagcgcgccgttgtgctgatcaaacagatgacatttaattcgccatttaccgcacattcccttcaggtgtaaatgatactgctggcgaaaacgctggatgaatgcttcttcactggaaagcagcggattaaaaaccaccacattacgcagcaacagctgataaccattgagatggcgcgtaagcaggacacgcttatcattgaccagcacctcgccccgcagacgttgccagagccagagtacccaataaaccggacgcggcagaccatggttatactgtagcgccaggcttgaggtatcgatggtgttgtttgcacgggcttctccctgaaggcccgaattgagccagaatcccgccagccagacctgctccgaaagtccgagcaggttctgcatcagcaacgccccacgaaaaaaccagccgtttgtcgcccgcgtgttgccggtgagggtattccaggagagaagccagacgggaagcgaacatttacgcaagcgaagggcagcgaggatctggcggaccttcagtatcggataattttccgttgaggagagaggggttgcccccagttgcgcgggatcgagaagctcattggcatcggccgaacaggcaagaaaatcggcctgcatcaggatggctgaactgaacagggtatcgtcgcttacgcccgcgctgacgggggcaaatcggtgccataaaccaaactttgcctgcggaagataagttcgtattgccttttgctgggccagccagacctgctcccgggtctcctcacttgcctgtgttgaccagtgcatgacgaagtgccagcccgcggtgatctctggcgaaaaatgattaaccgactgttgtaaaaaacgggtcagaagatcgcgacgggtcgttacgccggtgtgcagtagcaccgtccactgcttttttgccagccaggtgaagagctgatgcagattgtaccagcaggcgtagcccgccatctgggggtcatcccacccggtggcaaacagacgactgctgagaaaaggttcggcgatatcaattccctcaatgggaatggcctcatttatcgcctccagattttgtcgaacgtcctcacgcagcaaatcgtcgagctcacgcagggtaatgaccacccgcatacggcgcagcgaggcagaaagaggattgagctgctcaagatccaggctctgctcctgctgcggatgaacgatgagcggcgaggctccccaaccgcgcgccaccggttcattgagcaggctaaacagcttgtccacggcgaccggatagcgctgctcacgcctgtccgtccgaatacgtgccgcctccgggtgctggcgccgggccttacgaaactcacccggagacatattgtgaacacgcctgaaccgatcgctcatcatacnnnnnnnnnnnnnnnnnnnnnnnnnnnnnnnnnnnnnnnnnnnnnnnnnnnnnnnnnnnnnnnnnnnnnnnnnnnnnnnnnnnnnnnnnnnnnnnnnnnnnnnnnnnnnnnnnnnnnnnnnnnnnnnnnnnnnnnnnnnnnnnnnnnnnnnnnnnnnnnnnnnnnnnnnnnnnnnnnnnnnnnnnnnnnnnnnnnnnnnnnnnnnnnnnnnnnnnnnnnnnnnnnnnnnnnnnnnnnnnnnnnnnnnnnnnnnnnnnnnnnnnnnnnnnnnnnnnnaaccgatcgctcatcatacgcgtgctggcgaaaccctgctcaagcgcaatctggtgcagcggtcggttcgtcagcctgagagcgtcggccgccttttccagccgcaggtgggtgatgtactgcatgaaactgatccccacctccttgcgaaagagacgagagagccaggcttcagagacatattcactcgcggcgatttccgcaagcgtaatacggcgggaataactggcattgatccgctctatcacccgggcgatgcgtttgctgtgcgctgaggaaagttcccgggacagcatacgggcaggctgttgaaagcggctggtcagcaacagcaatatctcgctcagccagcggtacgcctccagccggtagcggtgcgggtcgttgatgagggtgaccacaagaagctggcgcagcagatcgcgaagcgcatcgcattggggccagacgcctccggcttctgccggtacagcataatcatgggcaaaaaaatcattgcagagctggacgacccagcgcccggaaagggttacgcgcagagtgacatttgccgtttcgctcgtgaactgccagcgccgatgacggttgatgatagcaagggtattggcctccaggatgtcacgtcccacatcggtgttcagctctgcccgcccttccagcacccagagcaacgttagcgtatcgccttcatcctccacgcagtggcgaatgtcctgaatctctatccaaaactcatctccccgttgcgccatcttacccctcaccaaagacaaaaaatgacctgatcttttttgtcataactgaattgtatgaaaaacaatcaaaataaagccgtcgctttacaacaaaaaaatgcattttcaggcgggacgatcgtcatagactcgaaattatcatcgtttggcagaaaaaggataacaaaaatgacacatcccattatcgaagctctgcgtggcaacgaagcccggttcactgaattacgtcactattttcatcagcatcctgaaattggttttgaggagcacaacacgagcgatcgcgttgcagcgctgcttcaggaatggggatatgaggttcatcgcggcctggcgaaaaccggtgtggtcggcacactgaaggtgggtaacgggcataagcgcctgggcctgcgcgccgatatggatgcgctgccaatgcaggaaaacaacggcaaggcgtggagcagtaccgttgagggtaaattccacggctgcggtcatgacggccacaccacaacgctcctgtatgcagcggagtacctggcacgcacccgtaattttaacggcacgctgcaccttatttttcagcccgcggaagaacttctgtatggcggacgcgttatggtagaggacggtttgtttgacctgttcccctgcgaccacatctttggtctacacaatatgccgtcacagcccctcggaaaaattggtctgcgcgatggcgccatgatggcctcttccgacacccttcatattgaggttaacggcgtgggtggtcacggcgcggtgccagaacataccgttgacgccaccctggttgcctgtcatatcactatcgcgttgcagtccattgtttcgcgcaacattacccccttccagccagccgtcgttaccgtaggcagcattcaggccgggcacgcccctaacattatcaacgacaaagtgttgatgaaacttaccgtacgcacgctggatgaacgcgtgcggcaaaccgtgctacagcgtatccatgatatcgccgttgcacaggcggaaagtttcaatgcgacggccaccattcgacacattaacggcagcccggtgctgaaaaacaatccgcaagccaacgagatggtgcgcagcgtcgccaccgatctgttcggtcaggatgccgtcgcggaggtcaatgcgtttatgggcagcgaggactttgctttcatgctcgagaaaaatcccaatggatgctatttcacgcttggcgccggggatgagcctgaccgctgcatggtacataacccgggctacgactttaacgacaacattctcctcaccggcgcggcgctgtgggccgcactgaccgaacactatctgcgctgattcgcaccttcccgggagggctgcactatgagtaccgtttccctgacaggcgcatccgcctacgccggtaacgatcggctgctggcgggtatcgtcatgagcgttctgacattctggctgtttgcccagtcggttatcaacgtggttccggccatgcagaatagcctcgatattgccctcgaaacccttacgctggccgtcagcctgagcgcgttgttcagcggctgttttgtcgtcgcctgcggtgggtttgccgataagtatgggcgcatgcgcctgaccatgattggcctgatcctgagcatgatcgggagtggtctgctgttcatttcatgggagcccgtcctgtttctgttgggacgagcgatacaggggctatcagcggcctgcattatgcccgccacgctgacgctgattaaaacctggtatgaaggtaaagcacgccagcgcgcaattagtttctgggttatcggttcatggggcgggagtggcctgagctcgtttgtgggaggcgccatcgccaccacgctgggctggcgctggatttttattctgtcgatggtggtggctctggtcgcgctattgcttatccgcgccacgccggaaagccgcagccctgatgcgtgtcgacacaaactggatatcagcggcctggtgagttttgtccttatgctggtgctgttcaatctgtttatcagcaaaggacacagctggggctggagcagcagtttatcgcttcttgtactgtgtggagccgtgattgcactgatgtgctttatcgttaccgggcggcggaaaggcgatgcggcgctgatcgatttcgccctgtttaaaaaccgggcctatagcgcctcggtattctcaaatttcctgctcaacggctgcattggcaccatgatgatcgccagcatctggttgcagcagggccatcatctgtcaccgctacagaccggcatgatgacgctggggtatctggttaccgtactggcgatgatccgggtgggtgaaaaactgcttcagcgctatggcgccaggctgccgatgatgaccggcccgctgctgaccgcaacaggtatttcgctgatttcatgcaccttcttaagcaaagaggtctacattgttaccgtttttctgagcaatattttatttgggctggggctcggatgttacgccacgccctcaacggacacggcggtaatgaatgcccctgaaaacaaagtgggggtggcttctgggatctataagatgggcagttccctgggcggcgcaatgggtatcgcggtcaccgcatcgctgtacgcgctatggctgccgatgggaacggccagtgccgcgcagtatgccttgcttttcaacagtgcgatttgccttgggtcggcagtcgtgacctgggctttactgccaacaacaaaagccccgcgttaagcggggccacaaaagtatcaggcaatgttcagatatttgtgcgtctgcatcgacagccgccagttgcgggcgatacaggtttcaatgcacagacgggtcgcatcgtctttctggctgataggctgtagcgcgatcacgcgctgcttttcgtccgtcagcgtcgccagcagttcatccagcgcttcgatgtcacgcacgcgccccaccggatgtttgatctcatcagcacgctcaagcgcctgcgacagtacgtcatacccgccgcgcatattcacttttggtgaaaccgtaacccacgttgaatgggagcagcgcacttcatgggtgccgctggtttcgatctgacagctatagccgttcttctcgagcagttcggtgagcggcatcagatcgtgaatgcagggttccccgccggtgatcaccacatgccgcgccgtccagccctgacgactaataatggcaagcagatcttccgcgctgcccgcgccccatttatcgctctctttggttttcgccagaatgctgaacagcgacacttcccgatctgcgagcttatcccacgtatgtttggtatcacaccaggcgcagccaaccgggcatccctgtaaacgaataaagatagcgggaacgccggtaaagtaaccctcgccttgcagggtctggaacatctcgttaatcgggtactgcatagtcaactctgttaaggggataaacgataagtatcgcagatccccgtcagatgatcatgctccatcggtgctttgcgcgccaattgccgccataaaccgttccgtaatttgctgtggtcgggtgatcgccccgccgacgacaaccgtgtgcgcccccagcgtcagacacctggccgcgcgttcaggcgtatccacgttaccttcagcaatcacggggatcgtgacggcagacagcacctctttcaaaaacgcgcagtcattttccggtagcgaatggcccgcagtctccgccgtataaccgtaaagggtggttccgacgcaatcaaaccccagcgcctgcgcggtcacggcctcctgcacggtggcaatatccgccatcagcagcagcgaagggtaacgggtgcggatctgcgcgatcagcatgtccagcgatccgccaccgggccgtttccgggcggtcgcatccagcgcaacgatctccgggccgaccgccatcaactcatccacttctttgagcgttgcggtgatgaacacctcgctgtccggatagtctcgtttgatgatgccgattaccggcagtgagaccagccctttgatagcctcaatatccaccacgctattggcgcggatcgcagcggcaccgccctgggccgccgccagcgccattcgcgacataataaacgggctgtgcagcggttcgttttccagcgcctggcaggagacgaccagttttcctttcaggttatccagtacagttttcattacgataagatctcttctacttcgtttttgataatggtgacgtgcggtccatagatgacctggacaccgttgccgcggacgattacgccgcgggcgccggtcgctttcagtgcagattcattgactttgctaccgtctttcaccgtgacgcgaaggcgcgtggcgcagcagtcaacgtcatccagattgtcttttcctcccagcccggcgatcaccgccgcggcgcgctcgctttgcggcagggtagcctcgtcagccaacgcctccttttcacggcccggcgtggcaaaatcaaaacgtttgatcagatagcggaaggtacagtagtaaaggaagaaccacggtacgcccaccagcgggacgaacatccagttagttttcgcttccccctgcaaaatgccgaacagcacgaaatcaataaacccgccggagaatgtttgtccgatggtgatgtgcagcatgtgcgcgagcatgaacgccagcccgtcaaacagcgcatgaatgacgtacagcaccggggcaataaacaggaatgagaactctatgggctcggtaattcccgtcaggaatgaggttaacgccgcagagagcagcagcccggcaacccgctttttgttctccggcctggccgtgtggtacatcgcaaggcaggcgccgagcagaccaaacatcatggtaataaagcgcccggacatgaagcgcgacgtgccctcatagaaatgctgcgtgttcgggtcggcgagctgggcgaagaagatccgctgcgtgccctcaaccaggtgaccgttaacaatttcactgccgccaagcgcggtggtccagaacggaagatagaagatgtggtgcaaaccaaacgggccaagcatgcgcaggatgaagccgtacagcaacgtccccagatagccggtggcatccaccagcccgccgaggccaaagatcagcttctgaaaattcggccagaccacggtcatcagcgcgccgacgagtatcgccgccagtgagctgataatgggaacgaagcgtgagccgccaaaaaagcccaggaattgcggaagcgcgattttattaaaccgatgatgcagtgcgcaggtcaccagcccaataactaccccgccaaacacgcccgtttcaagcgtctgaatacccagcgtcatgccctgccctacggcgcccgggttctcatgcgccagttttccggtcaggatcagcagcgcattgatagtggcattcatcaccagataagcgagtaacgccgccagccctgccgtgcctttatcattttttgccagcccaacggcgaccccaacagcaaacagtaccgacaggtttgcaaacacaatcgagcctgcgctgctcatgatggtaaagatggcctgtagccagccaacgtctaaaaatggatacgcggtaagcgtattcggattcgatagcgccccgccgatccccagcaacagacctgctgcgggcagtatggcgatgggtaacataaaggatttgccgaagcgctgcgctttttcaaaccatccgccggaagacgctccgctgaacatttgcatcatttttttatcccccctggttattgatgaaaatttttaccatatatatttttaattgtgaaaattaccaccaaaaaccaggacaccgatcatactttttcgaaatgactggcatctctcccccgctttccgccacactagttggcagagaaacgcattaaggatctagcatgtcggaccatgaaaacctgctgctgaagctacgccaggaggcttccgggtacagcccaacgcaacaaaaactgggggagtttgtcctcaacgatcctgccagggtgctctacctgacgatcaccgagctggcgcgtgaaagcggcaccagcgaggccagcgtcacacgcctttgccgcacgctgggctgtaagggatataacgaatttaaaatggcgcttgcgctggatattcagcagggtttgccggagcgtcaggcaggagatgcaatagataacgtggtggatgagtctgtccaggcgctgcaagataccgcaaaactcctcgaccgggcccagcttgaacaggcgacactggccctgcatcaggcgcagtcagtgcaaatttacggagtggcggccagcgcgattctgggggagtatttgcattacaagctgctgcgactcggcaaacctgcacagctgtttagcgatatgcatcgcgccgccatgaatgcgacgacgctctcgaaagagacgctggtggtggccatctcaagttccggctctacacgggatctgcttcacgtggtgaaactcgcccgcaagaggggcgttaaggtactggcactcagcaatacgcctcgcagcccgctggcctccctgagcgatttacagctggttgcagccaaacccgagggaccgctgagcgcgggtgcgctcaacgccaaggttggcgtgatgctactggttgaactgctaaccacttcccttattgcagtagacagccattacggtgacgttagccagcaaacggcaagcgccacgttgccgcttctgctatagaaaacaaaaaacccgccgaagcgggttttttcataagaacgaaggttcaggcttatgcctggcctttgatctctttacgaccgttgtaaggtgctttttcgcccagcgcttcttcgatacgaatcagctggttgtatttagcaacacggtcagaacggctcatagaaccggttttgatctggccagcagcggtaccaacagccaggtcagcgatggtagcgtcttcagtttcgccagaacggtgagagataaccgcggtgtagccagcgtctttcgccattttgatcgcagccagcgtttcggtcagagaaccgatctggttgaatttgatcaggatggagttaacgatgcctttttcgatgccttctttcaggatcttggtgttggttacgaacagatcgtcaccaaccagctggattttgtcgcccagtactttggtctggtatgcgaaaccatcccagtcagactcgtccagaccgtcttcgatagaaacgattgggtactgtttggtcaggtcttccaggaagtgggtgaactcttcagaggtgaacgctttgttgccttcgccggccagaacgtatttaccgtctttgtagaattcagatgctgcgcagtccatcgccagggtgatgtctttgcccagctcgtagcctgctgctttaactgcttcagcgataacagccagtgcttctgcgttagaacccaggtttggcgcgtagccgccttcgtcaccaacagccgtgttcatgcctttagctttcagaactttagccaggttgtggaacacttcagaacccatacgtaccgcttctttcagggttttcgcgccaactggctgaatcatgaattcctgaatatcaacgttgttgtctgcgtgctcaccaccgttgatgatgttcatcattggtacaggcatggagtatttgcctggggtgccgttcagttcagcgatgtgctcgaacagtggcatgcctttagctgccgctgccgctttggcgttcgccagggaaacggccaggattgcgttcgcaccgaagttagatttgttttcagtaccgtccagatcgatcatgatcttgtcgatgccagcctgatctttagcatctttgccaacgatagcctgagcaataggaccgttaacagcgccaaccgctttcagtacgcctttgcccatgaaacgggatttgtcgccatcacgcagttccagcgcttcgcgggaacctgtagaagcacctgatggagccgctgccataccgacgaaaccaccttccagatgaacttcagcttcaacggtcgggttaccacgggagtcgatgatttcacgaccgatgactttaacgattttggacattagattttcctcagtacaagttaaactaaaactccagacaaacaacgcgtaccaaaggtacgcgttgccgttctaactttttttacttcgcctgacgcttctggtactcgctggcggctttcacgaagcctgcaaacagcggatgcccgtcacgcggcgtagaagtaaattccgggtggaattggcaggccacgaaccacggatggttaggcacttcgatgatctcgactaactgatcatccccggaacggcccgcaacacgcagacccgcagcttcaatttgtttcaacaacatgttgttgacttcatagcggtgacgatggcgctcggtgatgaccggctcgccgtacagcttgcgtaccacgctatcgtcggacagctggcaggcctgtgcgccaagacgcatggtgccacccagatcgctcttctcggtacggacttcgacgttaccgtcttcgtcgcgccattccgtaatcagcgccacaacagggtacttacagtctggcacaaattccgtagagttcgcgttttccattcccgctacgttgcgcgcaaattcaatcagcgcaacctgcatacccaggcagataccgaggtatggaatattgttttcacgcgcatagcgtgcagtggcgatcttgccttcaacaccacggtagccgaagccgccagggatgaggatagcatccagatctttaagaatttcaacgccgcgcgtctccacatcctgtgaatcaatcagcttgatgttcacagagacgcgattcttcagaccaccgtgtttcagcgcttcgataactgacttataggcatctggcagttcgatgtacttgccgaccataccgatagtcacttcgccgcccggattggcttcttcgtaaatcacctgctcccattcagacaggttagcttccggacagttcaagctgaatcgtttacaaatataatcgtccagaccctgtgatttcaacaggcccgggattttataaatggaatcgacatctttcattgaaataacggctttttcaggcacgttacagaacaatgcaattttcgcgcgttcgtttgccggaatcgcgcgatcggaacggcaaaccaggatgtcaggctgaataccgatggagagcagctctttaacagagtgctgagtcggtttggttttcacttcacctgccgccgccatgtaaggcaccagcgtcaggtgcatgaacagcgcgtgctcacgaccaatatctaccgccagctgacgaatcgcttcgaggaacggcagggattcgatatcccctacggtaccgccgatttcaaccagcacaacgtcatgcccttcgccaccggcaaggacacgttctttgatggcgttagtgatgtgtgggatgacctgcacggtcgcgcccaggtagtcaccacggcgctctttacgcagaacgtcagagtagatacggccagtcgtaaagttgttacgacgggtcattttggtacggatgaaacgctcgtagtggccaagatccagatcggtttcagcgccgtcttcagtaacgaacacttccccgtgttgggttgggctcatggtgccaggatcgacgttgatgtacggatccagtttcatcatggtcacattgaggccacgggcttcaagaatggctgcgagggaggctgcggcaatgcctttacccagagaggatacgaccccgccggtcacaaaaatatagttcgttgtcatgctgaacctgagaagttagggtgaaacgatggaataaccaggacgggaaagtagtatacccgaacacgacgagcgccacaaactttcattctccgtctccactccatgccatgacaaacataaggagtgagaaaatagccccttttgggtaaatgtttttgacgcaaatcaagcgcttgtcatttaaaaaatcacacaaattgcgcttgatcgcaaaatctcgttagagatcatgttcctggcgttttacttcctgccagacttcttccatcgcgtcgaggtcaatcccgctcatttccaggccgcgcgaggccacaatccgctcaacttcgcgaaagcgtcgttcgaatttaatgttcgctttttgcagggcggtttccgcttttacaccgaggtggcgcgaaaggttgacggtcgcaaacagcagatcgcccatctcctcttccagctttgcttcatccacaacggcctgctgcgcttcatgcatcacttcgtcgatctcttcgtgcactttttccagcaccgggccgagagagttccagtcaaaccctaccgccgagcagcgcttttgaattttgtgcgcgcgcatcagcgcgggaaggttcaggggaatgtcgtccagcgccgagtgctgggatttttcagcgcgttcggcgctttttatctgctcccagcgcgccagcacttccgcactgttgcctgcggaggcatcgccaaaaatatgcggatgacgacgctccagcttgtcgctgatagcggcgcagatatcgtcaaagttaaagcgcccctcttcctgcgccatctgcgcgtagaacacaacctggaacagcaggtcgcccagctcaccgcgcaggtcgtcgaaatcttcgcgcgaaatcgcgtccagcacttcgtaggtctcttccagcgtgtaaggcgcaatggtggcgaaagtctgctctttatcccacgggcagccgttttccggatcgcgcagacgtttcatgatgccaagcaggcggtcgatttgagtcataacagattccattaaatgcctgagccgggtggcggcgttgccttacccggcctacagaagaggatgttnnnnnnnnnnnnnnnnnnnnnnnnnnnnnnnnnnnnnnnnnnnnnnnnnnnnnnnnnnnnnnnnnnnnnnnnnnnnnnnnnnnnnnnnnnnnnnnnnnnnnnnnnnnnnnnnnnnnnnnnnnnnnnnnnnnnnnnnnnnnnnnnnnnnnnnnnnnnnnnnnnnnnnnnnnnnnnnnnnnnnnnnnnnnnnnnnnnnnnnnnnnnnnnnnnnnnnnnnnnnnnnnnnnnnnnnnnnnnnnnnnnnnnnnnnnnnnnnnnnnnnnnnnnnnnnnnnnnnnnnnnnnnnnnnnnnnnnnnnnnnnnnnnnnnnnnnnnnnnnnnnnnnnnnnnnnnnnnnnnnnnnnnnnnnnnnnnnnnnnnnnnnnnnnnnnatccggcacctggttcagtttgccgagtacgcggcccagcacctgaaggttatagatttcgatagtcatatcgatggtggcaagctgctcgcgggtatcgctgcggctggcaacgcccagcacgttgaccttttcgttggcgagaatggtggtgatgtcgcgcagcaggccgctgcggtcgttggcagtgacgcgcaccaccagcgagtaacccgccgagtagctctccccccagacggcttccacgatacgttccggcgcatgcgattgcagctctgcaagctgatcgcagtcggagcggtgaatcgagatcccgcgcccctgggtgataaagccgacaatatcgtctcccgggatcggctggcagcagcgggcaatatggtgcatgaggttacccaccccttcaaccaccacgcggccattgtccttgctgcgctgctgcggagcgtaggttttctgctggagctgtttcagcgccgccgcatcctgctccgctgcgcttggcttgttgaactgcgcttgcaggaagttcaccatctggttcaggcggatatcgccgccaccaatcgccgctaacagttcgtcgagctcgttgaagttgtagcgtggcagcaggaacttctccgcctctttcaggcttatcccgatatgttccagctcgtcgtccaggatctgacgaccggcaaggatgttcttgtcacgatcctgcttgcggaaccaggcgtggattttagagcgcccacggctggtggtaacgtaaccgaggttcggattcagccagtcgcggcttgggtttggctgcttctgggtgatgatttcaatctgatcgcccatctggagctggtaggtaaacggtacgatacgtccgccgatcttcgccccgatgcaacggtgccccacatcgctgtggatgtggtaggcgaaatcgagcggcgtggagcctgccggcaaatcaacaacatcccctttcggggtaaagacgtagacgcgatcgtcgaagacctgactgcgcacttcgtcgagcatttcgccggagtcggccatctcttcctgccacgcaatcagcttacgcagccaggcgatacggtcctcgtgaccggagcgaccgccgccggaggtaccctctttgtatttccagtgcgccgccacgcccagctcggcgtcttcgtgcatctgtttggtacggatctgaatttccaccgttttgccgccagggccgagcaccacggtatgaatagactgatagccgtttggtttggggttggcgacgtagtcatcaaactcatccggcagatggcggaagtgagtatgcactatccccagcgcggcatagcagtcctggagacgctccgccacgatacgtacggcgcgcacgtcaaacagctcgtcaaaggcgagatgtttcttctgcattttgcgccagatgctgtagatgtgctttggacgcccgtagacctcggcgcgcacattctcctctttcatcgactggcgcagcccgctgacaaattcctcgatatagtgctcgcggtcaatgcggcgttcgtgcagcaattttgcaatgcgtttgtattccgccggatgcagatagcggaagcagtaatcttccagctcccacttcagttgcccgataccgagacggttcgccagcggcgcatagatattcgtacactctttagcggccaggacgcgctcgtcttccggcgcatccttcacttcacgcagatgggcaacccgttcggccagcttgataaccacacagcggaaatcatctaccatcgccagcagcatgcgacggacgttatccacctgctcggaagagacagagtccgtttgcgcggctttaagctgacgaatggctgccatgtcacgcacgccgtggataagcgccacgacggactggccgacgctttcacgcaggacgtcttccgtcaccacgtcggcgtccgccagggggaacagcagtgcggcctgtagcgtttcgatgtccatgttcagcatggagagaatttcaaccatctccacgccgcgccacaacagcagttcagcgtccggatgcccctgcgttgtgcgtaaacaataggcccaggtttcggttaagcgttcacacgactgctggctggaaatccccagacttgcgatccatttttgagggtcaaactcaccagctttatttaaatgtgcacttcttaccgcaaccatcgtcctctcctttagggacaagggcctgtcgaagtcgacaagccaaactcattagatgtgctcgaacaacaccatcgattccagatgaccagtgtgcgggaacatgtccagcattgccagacgtcgaatctggtaacccccgctcaataatgcttcgctgtcacgggcaagcgtcgccgggttacaggaaacatagaccacgcgttcaggcgcgagtttaattatatgctgcatcacgcccggcgcacctgcgcgcgccgggtcgagcaggatcttatcaaagccctgcttagcccacggttgctgagtaacatcatcctcaagattttgatgaaagaatgtcacattttgcaagccgttctgttgggcgttttcctggcctttcaccaccagcgcctcaacgccttccacccctaccacgcttgctgctttgcgggccagcggcagggtaaagttccccataccgcagaacagatcgagcacccggtcagtgggctgtacgtccagccacgccagcgcgttcgccaccatctgctggttcacgccgtcgttaacctggataaaatcccgcgggctgaacgttaagcgtagcccgtctgacgcataccagggcgcttctccgctgacctgctcaagtatctcgctttgcggcgcgaggaaaagcgcaagctcatgagaatgcgaaaagcgttccagtttttcgcgatctgcctttgacagcggcgcggtgtggcgcagtaccatcagcgggccactgttggccagcaccagttcgacatggcccagcgaacgcacgccatccagcgatgcaagacagtggtgcacgtccgggagcaacgcctcaagatggggcaccaaaacagggcactgcgtgacagagacgatatcgctggagccggctttgcgaaaacccatctccagccgctcggttttgggctggtagctgaggctcaggcgagcgcggcgacggtagccccagggccgatcggcaatgatgtcattcacgtcgtgtccgaccaggcgggccagtgcgctgcttttacttttttgctgtaattctgtgctggcatgctgttgctggcagccaccgcagacgccaaaatgggggcagcgaggcatcacgcgctccgggctatcattaagacggcgcttgacctgaccgcgcgcatactgacgtttttcttccgtcagcgtaatatctgcgcgttctcctggcagcaaacctgtgataaacagtgtcttacccttgtgacgcgccaccccctgtccaaaaggatcgaggtccgtggcttcaacagttatgatctgacgcgtcgtcacgcgtcgttttgcagagtagaattgcgccatcgccgagattgttctcaaataaacataattagcctgattgtcccataacggaactccatgaccaactacagcctgcgcgcgcgcatgatgattttgatcctcgctcctaccgttctcatcggtttgctgctgagcattttctttgtggtgcatcgctataacgatttgcagagacaacttgaagatgccggggccagcattatcgaaccgctggccgtctccagcgagtacggtatgaacctgcaaaaccgtgaatccattggtcagttaatcagcgtgctgcaccgccgtcattcagagattgtgcgcgccatttccgtttacgatgagcataaccgtctgttcgtcacctcgaatttccatctggatcccacgtcgctgaaaatcccggatggtacccccttcccgcgtcaccttacggtgttgcggcgcggcgatatcatgatcctgcgcacgccgattatctccgaaagctattcacccgatgaatccgcccagtccgatgcgaagtccagcaataatatgctgggatatgtggcgctggagctggatcttaagtcggtacggctccagcagtacaaagaaatattcatctccggcgtgatgatgctgttctgcatcggcatcgcgctgatcttcggctggcgactgatgcgcgacgtcacggggcctatccgcaacatggtgaataccgttgaccggatccgccggggtcagctcgacagccgcgtggaaggctttatgctcggcgagctggatatgctgaaaaatggcatcaactcaatggcgatgtcgctggcggcttatcacgaagagatgcagcacaacgttgaccaggccacctctgacctgcgcgaaacgctggagcagatggagatccagaacgtggagctggatctggcgaaaaaacgtgcgcaggaggcggcacgtattaagtctgagttcctggcgaacatgtcgcacgagctgcgcacgccgctgaacggggtgattggcttcacccgtctgacgctcaaaagcgagctgaacccgacccagcgtgaccatctgcataccattgaacgctcagccaacaacctgctgaccattattaacgacgtactggacttctcgaagctggaagcgggcaagctgattctggagagtattcccttcccgctgcgcagcacgctggatgacgtggtcacgcttcttgcccactcatcgcatgataagggtctggaactgacgctcaatattaaaaatgatgtgccggataacgtcattggcgacccgctgcgcctgcaacaggtcattaccaatctggtgggcaacgcgattaagttcaccgagagcggcaacatcgatattctggtcgaaaaaagggcgctcagtaataacaaagtccagattgaagtgcagatccgggataccggaattggtattccggagcgcgatcagacgcgtctgttccaggctttccgccaggccgatgcgagcatttcccgtcgtcacggcggaacgggcctggggctggtgatcacccaaaagctggtgaaagagatgggaggcgatatttccttccacagccagcctaaccggggctcaaccttctggttccatatcaaccttgatcttaacccgaacgtgcagaccgacggcccggtcaccgggtgcctgaaggggatgcgtctggcctatgtggaaccgaacgccgcggcggcgcagtgtacgcttgatgtattaagcagcacgccgctggaggtcatctacagcccgaccttctccgcgctggcgaacgatcattacgatatcctgttgttggggattccggtgacgtttaccggagaactgaccatgcagcaggaacgcctggcgaaggcggcctcaatgacggactacctgctgctggcgctgccgtgccacgcccaaatcaacgccgaagagctgaaaaacgacggagcggcggcgtgtctgctgaaacccctcaccgccacacggctgttacctgcgctgaccgaatattgccgtctgacgcatcagtccctgccgctggaaaacgacgaacataagctgccgatgacggtgatggccgtggacgacaacccggcgaacctgaagctgattggcgtgctgcttgaggatcaggttcagcatgttgagctgtgtaccagcggcgccgaagccgtggaacaagccaaacagatgcagttcgacctgatcctgatggatattcagatgccgggcatggatggcatccgcgcctgcgagttgattcgccagcttccgcaccagcagcagacgccggtgattgccgtgacggcgcacgcgatggcggggcaaaaggagaaactgctgggtgcgggcatgaacgattatctggcgaaaccgatcgacgaagagaagctgcacagcctgctgctgcgctacaagccggggcacattggcgggacatacaccattacagctgaatcgccggagatcagcgttaaccagaatgccacgtttgactggcaactggcgctgcgccaggcggcgggcaaaccggatctggcccgcgatatgctgcaaatgctggtggacttcctgcctgagatccgtaacaaggttgaagaacagctggtgggtgaaaaccccgaaggactgctggaagccattcataaaatgcacggcagctgcggctacagcggcgtaccgcggttgaaaaatctctgccagttgcttgaacagcagctccgcgccggtacgccagaatccgatctcgaaccggagttcctggagctgctggacgagatggacaacgtgacgcgggaagcaatgaaggtgttggggagctaagacaaaagcccggtggcgcttcgcttaccgggcttacaggagcacgaacgttaacgcgacatcccccgccccatctttatcaccgctgcaatattccttgcggccatctgtacattctgttgcgcattttccagcgcatcccccagcgagcagatggtgtagatcacgctgaatacggcatccagtccatgctcatgcaccacgccaacatccgccgtcaggctgccggcaatgccgataaccggcttgttannnnnnnnnnnnnnnnnnnnnnnnnnnnnnnnnnnnnnnnnnnnnnnnnnnnnnnnnnnnnnnnnnnnnnnnnnnnnnnnnnnnnnnnnnnnnnnnnnnnnnnnnnnnnnnnnnnnnnnnnnnnnnnnnnnnnnnnnnnnnnnnnnnnnnnnnnnnnnnnnnnnnnnnnnnnnnnnnnnnnnnnnnnnnnnnnnnnnnnnnnnnnnnnnnnnnnnnnnnnnnnnnnnnnnnnnnnnnnnnnnnnnnnnnnnnnnnnnnnnnnnnnnnnnnnnnnnnnnnnnnnnnnnnnnnnnnnnnnnnnnnnnnnnnnnnnnnnnnnnnnnnnnnnnnnnnnnnnnnnnnnnnnggatcgtctggctgtcgatacgcccttcgcccgtgatcaccagatcggcgtccgcgacctgttcatcaagatgcagggcatcggtgacaatctcaatcccctgacggagctgtgcgccgcaaaatgcatacagcgccgcccccattccgccagccgcaccgccgcccgccaggtttaagacgtcaatatccagatcccgggcgataatttttgcgtaatgcgccagcgcgttgtccagcgtcctgaccatctccggcgtcgcccctttctgcggaccaaataccgcagaagcgccagcttcgccgatcagggggttggtcacatcgcaggccacttcaattcgacagtctgccagccgcttatccagcccgctaagatcgatatgcgcaaggcttgccagttcgccgccgcccggccctacgggctgcgctttcgcatccagcagttttacgcccagcgcctgcaccatgcctgcgccaccgtcattggtcgcgctgcctccaatgccaataatgatatgcttaacgcccgcatccagcgcatgacggatcagttccccggttccccaggaggtggtgattaacgggttacgctttgccggagcaacaagctccagaccgctcgctgccgccatctcgataaaggcgcttttcccgtctccggataacccgaaaaacccttccacgcgttcacccaaaggcccggtaacgggaacatggacaagacgcccatgcgtggctgccaccatcgcttccaccgtcccttcgccaccatcggcaaccggtaatttgacatagtccgctgacgggaaaatgtcgcgaaaaccgacctctatcgctgtcgccacctccagcgcgctcaagctttccttatacgagtccggagcgataacaattttcataagccatccttacgcatgttagttacgttaagcatacaccacgtaagggaccactcatgggagcggtcccaatgcgcttatcgtaccatgcacggacgtttattgtcgaatgtccactctgggatcaggtattgcatcgccagcgcgtcatcacgcgcccccaggccgtgtttctggtacagctcgtgcgctttcatgacctggtccatatccagctctacgcccagacccggcgtagcaggaacctgtaccataccgcctttgatttcaaacggctgtttggtcaggcgctggttgccctcctgccagatccagtgggtgtcgatggcggtaatgttgcccggcgcggcagccgccacgtgggtgaacatcgccagcgagatgtcgaagtggttgttggagtgcgagccccaggtcaggccgaactcatggcacatctgcgccacgcgaaccgagccctgcatcgtccagaagtgcgggtctgccagcggaatgtccaccgattgcagcgagagcgtgtgccccatctgacgccagtcggtcgcgatcatgttggtcgcggttggcagcccggtggcgcgacggaactccgccatcacttcacgtccggagaacccctgttctgcaccgcacggatcttccgcataggccagcacgcctttaagctgcttaccgatttttatcgcctcatcaagcgaccaggcaccgttcggatccagcgtgacgcgcgcctgcgggaagcgcttcgccagcgcggcgatcgcctctgcttcttcttcacccgccagtacaccgcctttcagcttgaagtcattaaagccatatttttcatacgcggcttccgccaggcgcactaccgcgtccggggtcatcgcttcatcgtgacgcacacgataccagtcgcatttttcgtccggctggctctggtacggcagcggggtgagtttgcggttgccgataaagaacagatagccgagcatctccacttcactgcgctgttggccgtcgcccagcagggaagcgacattgacgcccagatgctggcccagcagatccagcatcgcggcttcaatgcccgtgaccacatggatagtggtgcgcagatcaaacgtttgcagaccacggccacccgcatcacgatcggcaaaggttgtacgcacgcgagtcagcacatttttgtactcgcccagcgttttacccaccaccagcggaatggcgtcctccagcgttttacggatcttctccccgcccgggatttcaccgacaccggtatgccctgagttgtccttgatcaccacaatattacgggtgaagaacggcgcatgggcgccgctcaggttcatcagcatgctgtcatgtcccgcgacaggaatgatctgcatggaggtgactacaggggtagaaaatgtgctcatcgttcgatccttttatcagtgacgtccaaatacagggcgcttacggtcaaatgtccagccggggataaggtactgcatcgggcctgcgtcgttgcgcgcgccgcccggcagttttttatacgcttcatgcgccttgtggatctgatcccagtcaagctccacgcccagccccggcgcatccggtacggcaattgtgccatttttgatttcaagtggatttttggtcaggcgcgcttcgccttcctgccagatccagtgcgtatcgatggcggtcgggttgcccggcgccgccgcgccaacgtgggtaaacatcgccagcgaaatgtcgaaatggttattggagtggcagccccaggtgagcccccagtcatcgcacagctgcgccacgcgcaccgcgccggaaagggtccagaagtgcgggtccgccagcggtatgtccaccgcattcagcatcaccgcatggcccatttcacgccagttggtggcgatcatgttggtcgcaaccggcagcccggtagcgcggcggaattcggccatcacctcgcggccagaaaatccctgctcggcgccgcacggatcttccgcgtaggtcagcacgtcgcccagccctttgcacagcgcgatagcttcatccagcagccaggcgccgttcggatcgacggtgatgcgtgcctccgggaagcgttttttcaacgcgcgcacgctgtcaatctcctgctcgccgggcagaacgccgcctttcagcttgaagtctttgaagccgtagcgatcctgcgccgcctctgcaaggcgtaccacagcctcgccagagagcgcctcctgatgacgcaggtgataccactcgtggctgcccggcgagcgttccagatacggcagatcggttttcgtccggtcgccaacgtagaacagatagcccagcaccgttaccgcattacgctgtttgcctggccccagcagttcgcagaccggcacgttcagcgccttgcccagtaaatcgaggagggccgcctccagcgccgccaccgcgttaacgcgcagttcaaacgtccaggcgcctttgccgaaggtatcaaaatccgccgactggttacccttatgcacccgctgaaccaccttgttcaggcgggcgacctcctgcccaaccacctgcgggatggcgtcgaccagcgtctggtaaatcacctctccgccaggcgcttccccgacgccggtattccctgcgctgtcggtcagcaccacaatgttgcgggtgaaccaggcgttatgcgcgccaccaatgttgagcagcatgctgtcctgccccgccaccggaatgaccttcatctccgtcacgatcgggcttgattgcgttgtcatcatccgcgctccccaacaggtttcagttcgattcgtttgatgtcacccaccagcaccagataactgagcaccgccaccagagcatggacgcctacataaatcagcgcgccgttgaaggagccagtggtgccgacgatgtaaccgatagcgattggggtgacaatgccggaaatgttgccaaacatgttgaacagaccaccgctcaggccgctgatctctttcggcgcggtatctgccatcaccgcccagcccagtgcgccaatgcctttaccgaagaaggccatcgccataaagccgataatcatccactccgcgctgacgtagttacagaacaccatggtcatggagagcagcatgccgagtacgattggcgttttacgcgcaatattcagcgaaccggtacgacgcatcagccagtcggagatgaccccgccaagcaccccacccacgaagccgcagatggccggcacggaggcgacaaaccccgccttcagaatcgacatcccacgcgcctgcaccaggtaaaccgggaaccaggtgataaagaagtaggttaaggcgttaatgcagtactggccgagatagataccgatcatcattcgtgagccgacgagctgtttgatctgcccccatttctggctgaacggaactttagctttctgggttttctgatccatgttgatcagcgccccaccttcagcaatgtagtccagctctttcttgttcacgcccggatgctggtttggttcgtggatcactttcagccagatgaagctgatgacgatccccagcccgcccatgaagaagaagacgtgcgaccagcccacttcgtgcgtcagccagcccatgattggcgcgaaaataaccgtcgcaaagtattgcgccgagttaaagatggctaccgccgttcccctctcctgcgccgggaaccaggcggccacaatacggctgttgccagggaacgatggcgcttccgctaagcccaccaggaagcggagggtaaagagcgcaatgataatgccgaagccgctgaagatatccacgaagccctgtaacagggtaaacatcgaccagatgaaaatggaccagaaatagacccgttttgaaccaaagcggtccagcagccagccgccagggatttggccgattacgtaggcccatgaaaatgcggagaaaacataacccatacctaccggatcaagtccgatgtcctttgccatctcagagccggcaatggataacgtggcacggtcgccgtagttgaaagaggtgacgataaacagcatcaccactatccagtagcgggcgttggtgcgcttctcagcgctgctcgccgcgtggcttaatgtactcattgttgcactcctgaaacatagctttcgcctggttcattctgtacagcacctgtagggtaatcagaatgagagatttgtgtttggttttggtacggccagaagccgttttatagtgacgggaaaagtatatgaaggagtgcctcttcacctcaccgtgcaaaaacacagtattgaagggcgtgagggaggttgtttagggcataagcccagaggagtggaaggtggttcacggaaatggcgtttggggcggggtgtaatgccgggtggcggctacgcctgacccggcctggcattggtatagcgcagggttatttaagcagcgttgcccagtgttcaacccagggatttgactcgctttctggctcagggtgttcacccgcatcaatcagcaacatctctccgacgcgctgagcgctctgttcctgcaacagcgcgtcgaactgtttaccgccgccgcagaaattagcgtaagagctatcgccgagggcgatgatgccatagtgaacatctggctgatagccgagctggtctttaatgccctggaaaagcgggacgatgctgtccggcagatcgccctgcccggtggtggaggtcaccaccaggatgtatttatctttatacttttcccagtccgccagctccggatcttcatagaccgttgctttatggccctggtttacaaggattgcttccgcttcctccgccaccagcagcgagttgccgtacatcgtgccgacaaaaatgcctacttcagccatgctttgctcccgtaattattgcgcttgctgttcatcctgaacgttgcctgcggcaaactcaaccctttcattttcggggagttgtcccagccagccaaactgtgacagcgcctgcatccagacctcgtccagccctgcgcgaatagtcagcggttcgccggtaaacgggtgcgtcaggcgtagctcgctggcgtgcagcatcagccggttacagccaaagtgctcggccgcgctgcggttctggcgcagatcgccgtgcttgctgtcgccgataatcgggtggcgcagatgtgcaaggtggcggcgaagctggtgcttgcgcccggttttgggcaaaagctcaaccagactgtatcgcgtggtcggaaatttgctggtcgccaccggcagttctgtggtcgccataccgcgatagtcggtcaccgcaggctgcgggcctttatcttcgcgggcaaatttatcggcaattttatccagttcctccaccagcggataatcaagcgtggcggaatccgtcagccagccacgcacgatggcgtggtagcgcttttgcatctggtgctgctcaaactgctgcgaaagcagtcgacccgcctcactggaaagccccatcagcagaacgccagaggttggcctatccagacgatgggcagtaaagacgtgctgaccgatctgatcgcgcacggtttgcatgaccacgactttctcatcgcgatcgagccagctacggtgcaccagccagccggacggtttattcaccgccactaaccactcatcctgataaaggatctcaagcgtcatgcatcgtcaccggcgaaaagcgcatcgagcttttccagctccaccagcatcatggcacgcgccgggtgggtcgcttccagcgccatttcgtaatagggagagacggcaaaagacgcgggcaacgcgtgaccaccttccagtagcgcgtgcatacgaggaattaagacccactggagccactcgaannnnnnnnnnnnnnnnnnnnnnnnnnnnnnnnnnnnnnnnnnnnnnnnnnnnnnnnnnnnnnnnnnnnnnnnnnnnnnnnnnnnnnnnnnnnnnnnnnnnnnnnnnnnnnnnnnnnnnnnnnnnnnnnnnnnnnnnnnnnnnnnnnnnnnnnnnnnnnnnnnnnnnnnnnnnnnnnnnnnnnnnnnnnnnnnnnnnnnnnnnnnnnnnnnnnnnnnnnnnnnnnnnnnnnnnnnnnnnnnnnnnnnnnnnnnnnnnnnnnnnnnnnnnnnnnnnnnnnnnnnnnnnnnnnnnnnnnnnnnnnnnnnnnnnnnnnnnnnnnnnnnnnnnnnnnnnnnnnnnnnnnnnnnnnnnnnnnnnnnnnnnnnnnnnnnnnnnnnnnnnnnnnnnnnnnnnnnnnnnnnnnnnnnnnnnnnnnnnnnnnnnnnnnnnnnnnnnnnnnnnnnnnnnnnnnnnnnnnnnnnnnnnnnnnnnnnnnnnnnnnnnnnnnnnnnnnnnnnnnnnnnnnnnnnnnnnnnnnnnnnnnnnnnggttgggtgctggcgaacgcgtctggctgcggcgcgttatcctgccacagctgatgctggcgcataagggcttcgatggcgtgcaactgcgcacgaacgttgtcatgatgcgacatatatacctcaactgaaaaacggaatggcgcgaagcatagcattgcggacgacagaaataaaaaaagggagcactgtaaaaacagtgctcccggttcgtttcgcagcattccagctacaatacgtgctccctgctcatccgtgacaacttttcctgatgcccgaaggcctggtcatccatttaccttttgcttcctgctcacatcgtcctgatgtgtaggtttcatcctgaaacgtcctggccatcctgacccaccgaccatactgaccggctctcgttctccttcctggaggtgtcccttacgcatcctgcgtgatccactttgcttcatcctgaagccttcctgcggcgtcatcctgacgtgtccctggtaagaaacgccatcatcctgatgttcgtttctcgtgtcggcatcctgtcgacacagatagaatccgctattctgcttcgtcttacaacccaccttgtaagcaatgtaagccaggcgaaacgggggatttcctttcagaaaaacactaacctgttgaaagaaaagttaatattaatctgaaattcctaaggcaacgctaactgtttcggcgatgtctcacagagcgtgtaagagatctctcacacgtccagtagcatcatggattacagaagcggcttaatttgggtaagaaaatccgcaagtgaaggcgcgagaacgtcgcgattgcgggtgccgagcgtctctttgatgacctcgccagacaggttgcagacagaaatgacgtccagttcactgtcgagcgtcgcaataaaaagagtcggagagagcttaaggcgtttttgcgtgaccaggtgaccaatgaggttttcctgaacgcgttgcagatcgtcttcgctccaggtttgcagcagcgtcagcggctgtcctgcaatacatgcagtcatatccccggcaaactgcgtggtataaaatgcatgaagcgcaggttgtatcacaaggtccatcgcgcgttcaaccgcatttacattctgctcgcccgtgaacggtttcggttgccagataacgtaatcatcctgcgaagcgataatgcacggtgacggcacgccatataagtcagtactttgcggccacgtcccccgcttttcatgccaggcatcgcaatagcgggtcgtgaaggacgtcagggcatttgcagtttcgatatccaccgatttctctcttcttgtaagacaggataaactcagcccataagtgtacctgtaaagtggctatgaaacatgtcttacgaaaatcatcaggcgttaacgggcttaacgctgggtaaatcgaccgattaccgcgacacctacgatgcaagcctgttgcagggcgtgccgcgcagtctgaaccgcgatccgctcgggctgcacgctgacgcgctgccgtttgtcggcggcgacatctggacgctgtacgaactctcctggctgaatgcgcgcggtctgccgcaggtggccgtgggccacgtcgagctggattacgccagcgtaaacctggtcgaatccaagagctttaagctctatctcaacagctttaaccagaccaaattcaacagctgggacgaggtacaacagacgcttgaacgtgatttaagcgcgtgcgcgcaggggaacgtaaccgtctcgttataccgtctgcatgagctggaaggacagcctgtcgcccatttccacggcacctgcatcgacgatcaggacattgaggtggaaagctatgaatttagcaccgactacctggaaaacgcggcgggcggaaaagtggtcaacgagacgctggtcagccatctgctgaaatccaactgccttatcacccatcagccggactggggctcggtacagatccagtaccgcggcccgcagattgatcgtgaaaagctgctgcgttacctggtgtcattccgtcatcacaacgaattccacgagcagtgcgtggagcgcatcttcaacgacatccagcgtttctgccagcccgaaaagctgagcgtttacgcccgctacacccgtcgcggcggtctggatatcaatccgtggcgcaccaataccgattttgtgcctgccaccggacggctggtgcgccagtaagataaatattttcacaatatgcgggcggtattccgcccgaagtgttgtgaaacgtcataagccagggctattgtaatcaacagggaaagacgataatcgtcccataaggagctcacttgattacacatattagcccgcttggctctatggatatgttgtcgcagctggaagtggacatgcttaaacgcaccgccagtagcgacctttatcaactgtttcgtaactgttcacttgccgtactgaactccggaagcctgaccgacaacagtaaagagctgctgtcccgcttcgaaagttttgatatcaacgtgctgcgccgcgagcgcggggtgaagctggaagtgatcaacccgccggaagacgcttttgtcgacgggcgtattattcgctcacttcaggccaacctgtttgccgtgctgcgcgacattctgtttgttaacggacagatcagcaacgccggacgtttccagcatcttgacctggaaagttccgttcatatcaccaacctggtcttctccattctgcgtaacgcccgcgccctgcacgtgggcgaagcgccgaacatggtcgtctgctggggtggtcactctattaacgaaaccgaatacctgtatgcccgccgcgtggggacgcagctcggcctgcgcgaactgaatatctgtaccggttgcggtcctggcgcgatggaagcaccaatgaaaggcgcggcagtaggtcacgcgcagcaacgctataaagaaggccgttttatcggcatgaccgagccgtcgatcatcgccgctgagccgcctaacccgctggttaacgaactgattattatgccggatatcgaaaaacgtcttgaggcgtttgtccgtatcgcgcacggcattattatcttcccgggcggcgtaggtacggcggaagagctgctttatctgctcgggatcctgatgaacccggccaacaaagatcaggttctgccgctgatcctgaccggcccgaaagagagcgccgactacttccgcgtgctggacgagtttatcgtgcatacgctgggcgaagacgcgcgccgtcactaccgcattattattgacgatgccgcagaagtggcccgtcagatgaaaaaagcaatgccgctggtgaaagagaatcgtcgtgataccggggatgcctacagctttaactggtccatccgtatcgcaccggatcttcagatccccttcgagccgtcgcatgagaacatggcgaacctcaaactctatccggatcagccggtggaagtgctggctgccgacctgcgtcgcgccttctctggcatcgtggcggggaacgtgaaagaggtggggatacgcgcaattgaagagtttggcccgtataagatccacggtgatccggagatgatgcgccgcatggatgatatgttgcagggctttgtcgctcagcaccgcatgaagcttccaggctctgcctatattccgtgttacgaaatcatcaagtaaagcgacattcctctcctctcaagccggatcgtcatccggcttttttattcgtgttgcaattcatagcgatcttcaatgttattaacaaatctgacgcctgcgcaaacgattacctcgtttttgaaaccgtaaataatcagtcttaatcgaaattacccgccagaaaatcctaaaatcccatttctttacagcgaaagacacctatctcgcgggtcgaccttttcgaaaacatgtcgttaatggtagccttcgcgcccgtaaattctctttgatgtttttttaacagataaatggtctaaagatacccacatcacaagtggattattgcatttgggatcgcgatcactgatagattcataactagaatgtatctttccgcccgccaatagttacgggcaaaaattattaaaaaaccgtcactgaacgaatttcatattaccgtcaggcgctttttcatcggatttgactaaaaacctgacaatttgcttcctccaggagatacagatggaaaccactcaaaccagcaccgttgcttcgattgaatcccgaagcggttggcgcaaaacggataccatgtggatgcttggcctgtacggcacagcaatcggcgctggtgtactgttccttcctatcaacgcaggtgtcggcggtatgatcccgctgatcatcatggccctcatcgccttcccgatgaccttctttgcgcaccgaggcctgacccgcttcgtgctgtccggtaaaaacccgggcgaagacatcactgaagtcgtcgaagaacacttcggcgtcggcgcaggtaagctgattaccctgctctacttcttcgcgatttacccgattctgctggtgtacagcgttgctatcaccaacaccgtagaaagctttatgatgcaccagcttcagatgaccccgccgccgcgtgcgattctgtccctgatcctgatcgttggtatgatgaccatcgtgcgcttcggcgagcagatgattgtgaaagcgatgagcgtgctggtgttcccgtttgttgcggctctgatggtgctggctctgtacctgatcccacagtggaacggcgctgcgctggaaaccctgtctctgagcagcgcatccacgaccggcaacggtctgctgctgaccctgtggctggcgatcccggttatggtgttctccttcaaccactcgccaatcatctcttccttcgcagtagcgaagcgtgaagagtacggcaatggcgcagagaagaagtgctccagcatcctggctcgcgcgcacatcatgatggtactgaccgtaatgttcttcgtgttcagctgcgtgctgagcctctccccggcggatctggcggcggcgaaagagcagaacatctctattctgtcttacctggcaaaccactttaacgcaccgctgattgcgtggatggcgccgatcatcgcaattatagccatcaccaaatccttcctgggccactacctgggcgcacgtgaaggcttcaacggcatggtgattaaatctctgcgtggtaaaggcaagaccattgaaatcaaccgtctgaacaaaatcactgcgctgttcatgctggtgaccacctgggcggtagccaccctgaacccaagcattctgggcatgattgaaaccctgggcggcccaattatcgcgatgatcctgttcctgatgccgatgtacgcgattcagaaagtgcctgcgatgcgtaaatacagcggccatatcagcaacgtgttcgttgttgtgatgggcctgattgccatctccgctattttctactcgctgttcagctaatacctcctgcgccgtctgcggacggcgcacttctcccctctgactgaagcaatggacgcatcatgattagcgtattcgatatcttcaaaatcggtattggtccttctagctctcacaccgtcggaccaatgaaagccggtaaacaattcacggatgacttgattgcacgcggcattttgcacgacatcacccgcgtggttgtcgatgtatatggttccctttccctgaccggtaaaggccaccataccgatattgccattatcatggggctggcgggtaatctgccggataccgttgatattgatgcaatacctggctttatccaggacgtgaacacccacggtcgtttgctgctggcgaacggcgagcatgaggttgaattcccggttgatcactgcatgaatttccatgcggataacctgtcgctgcacgagaatggcatgcgcattaccgcgctggccggcgacaaagcggtttacagccagacgtattactccatcggcggcgggtttatcgtcgacgaggaccattttggtcaaagcaccaattctgccgttgatgtgccgtacccttacaaaaacgcggccgacttacagcgtcactgccaggagacagggctttctctctccggcctgatgatgaaaaacgagctggccctgcacagcaaagaggagctggaacagcacttcgctaacgtctgggaagtgatgcgcagcggcattgagcgcgggatcaccaccgaaggcgtgctgccgggtaaactgcgtgttccgcgtcgtgcggctgcgctgcgccgcatgctggtcagcaccgacaaaaccaccaccgacccgatggccgtcgtcgactggatcaacatgttcgcgctggcggtgaacgaagagaacgccgcgggtggccgcgtcgtcaccgcgccaaccaacggggcgtgcggaattgttccggcggttctggcgtattacgacaagtttatccgtgaagtgaatgcaaactcactcgcgcggtatatgctggtcgccagtgcgattggctcactgtacaagatgaacgcctcgatttccggcgcggaagtgggctgtcagggtgaagtgggcgtcgcctgctctatggcggcggcgggtctggccgaattactgggcgcaagtcctgcgcaggtttgtattgcggcggaaatcggcatggaacataacctggggctgacctgcgatccggtcggcggacaggtccaggtgccatgcatcgagcgtaacgccatcgcctctgtgaaagcggtgaacgcggcccgtatggcgctgcgtcgtaccagcgaaccgcgcgtctgcctcgacaaggttatcgaaaccatgtacgaaaccggtaaagatatgaacgccaaataccgcgaaacttcccgcggtggcctggcgatgaagatcgtcacctgcgattaagcctctcaggaagcctcgttttgcgaggcttcttcctgttttcgccaccattcatagtttcatgctgcgctcagtgttacccttcacctatcagacagaagggagattatctgtggccgttcatttgcttatcgtcgatgcacttaacctgattcgccgtattcatgcggtacagggcaccccctgcaaggacacctgtttacacgcgctggagcagctcattcgccatagcgaacccacccacgctgttgccgtattcgacgatgaagcacgcaataccggctggcggcaccagcgcctgccggactacaaagccggacgtgcgccgatgccggacgatctgcacgcagaaatgcccgctatccgcgcggcctttgagcagcgcggcgttccgtgctggggcgcccacggtaatgaggctgacgatttagccgcaacgctggcggttaaagtcgcgagcgccgggcatcaggcgactatcgtttcaaccgacaaaggctactgccagctgctctctccaacgatccgcatccgggactactttcaaaaacgctggctggacgcgccattcattgccagcgagtttggcgtatcgcctgagcaactgccggattactgggggctggcggggatcagcagctctaaagtgccgggtgtcgccggtattggacccaaaagcgccgcacagctgctgacggagtttcagagtctggaaggaatttacgccaggcttgatgaagtgccggaaaaatggcgcaaaaagctggaggcgcataaagagatggcgtttatctgccgggaggtggcgacgctacagacggatttacagctggacgggaatttacagcagttaaggttagaacgttaaaacaactacacgattttgtaggcccggtaagcgcagcgccaccgggcgttacaaacgttatcgctcgtcgcgacgcccacccactgccgcccaccagcgacggatatggaccgtcacttcttcgcggtcgtgataaagctgacgcgcctggatttccgcgttaatcccgtgttcgtccagctgctgctgaatataggccaggttctgcgacacctcttcgtagcgctttttcatcggcagcttgaggttgaaaatcgtctcacgacaccagccgttcaccagccaggaggccatcagcgccgcgactttcgccggtttttctaccatgtcgcacaccatccaggagatgttgttgcggttcgggcgatagcggaagccgtcctcacgcagccaggtgacctgcccggtatccatcaggctttgcgccatcgggccgttatccacagacgaaacccacatattgcgtttcaccagctgataggtccagccgcccgggcacgcgccaaggtcgacggcatacatgccgtttgccagacgttcgtcccactcgtccgccgggataaagacgtgaaacgcctcttccagcttcagggttgaacggctcggcgcatctgccgggaagcgcagacgcgggatccccataaagaacggcgaattattggtggtatacgagtagccggcgtagcaacatcctggcgcaataaagaagatatgcacgaccgggcgctttggcgtttcgtagtttgtcagcacacccgcatcacgcagcgccgcgcgcagcggcacggtgaacttacggcagaacttcatcagctctttgctttcgttggtgtcggccacttccacgcgcaaatcgccgcccttctccaccacaccctgcaacaggccaacaatcggcgtgatgcgatcttccggcggaagatctttcagcagttcgcccgcgacaaacatctgacgggcgaaaatcaatgagctgaacggcagttcgcgcgccagcttgtcggcatcatcaggctgatagcattcaaataccacatagcccgcgttctctttgacgcgagcgaatccgaagacttcacgcttcgccgctttatcggtgatttccgcggcgcactctttctcaaaccccgggcgacaatataaaacaaccttattcatgaacaacgcccttgcgtttcagacggatagctccgataaacattaacacccaacccgccaggaagctgacgccgccgacaggtgtaacaaacgcccacaggcgtaaatgcgacagcgccagacagtaaagactgccgctgaacagtacggtacccagcgccagaaagacgctgctccagtaaaaccagatgctgatgcggcgctgcatcgccaccgccagcccaaaaatcgccagcgtgtggaacgcctgatattcaaggccggtctggatccagcccatctccacaacgcccagagatttgcttaagacatgcgcgccaaacgcgcccagagctacaaaaataaagccactcaccgcggcgaaaatcagcatgaatcggctggtcatgtttaagtcctgaattgatgcgtgcccggcacacaaacgttattgttcatacctgaagcggaatttttcttgctcgcttgccgctttcgccagtatccactgccggaaagcggctattttacccagttctgcctgactgtcatgacaaaccagataaaatgcattcttgctgaccagtacatcgttaaatgggcaaaccagacgacctgcctcaatttcggactgcgccataacgttgtttgccaacgccacgccctgcccgtgaatggcagcctgtagcaccatcgcgctgtggctaaaaatgggaccctgctgcacgtttatatgattaagacctaactggcgggtataagtttgccagtcgcgacgcgaagcatcgtgcaaaagcgtatgttgcgccagatcggcgggcgttttgagcgctttatcccccgtcagcagcagcggtgaacagaccggcaacagatattctgcgtataatttttccacacgcaagcccggccagttaccgcgaccgtaaaaaatcgccacgtccacatcatctgccagcttgtcttcctgacggtccaccgcctggattcggacatcgattcccggataagttgagttaaagcttgagagtcgcggcaccagccactgaatggcaaaactgggcaataaactcacagtcagagcgccttttgcgctccgggcctgaagcttgcgagtggcttccgtcagctgggaaaaaatctctttaatatcctgaaaatagctctgcccctcttcggtcaacagcaacgaacggttgcgtcgacggaacagcttaagccccagaaaatcctccagagacttgatttgatgacttactgcggcctgtgtcacaaaaagctcatcggctgcgcgggtgaagctgaggtggcgtgctgctgcatcaaaaacacgtaatgcatttaggggtggcaatcgcttggacatggttatctggcttagatgttaacgagatttaacatataggaaacaacgtttaacctattagttttttttatctgagccattataatttgtccgttgaggaactaccagcaaatacctatagtggcggcacttcctgagccggaacgaaaagctttttttggaatgcgtgttctgaagggcttttggcttacggttgtgatgttgtgttgttgtgtttgcaattggtctgcgattcagaccacggtagcaacgctaccaatttttcacttcctgtacatttaccctgtctgtccatagtgattaatgtagcaccgccaacttgcggtgcttttttttcgcttatctaactgttaatgctcgatttccttcatctctttcacgtcactgcggttgatctgctgtttgttcccgttagcatctttgtaagaaatcatcccggtatcattatcggttgtcggtttcccttcagagacgatagatcgaccatcgttggtatgcattacgtagttattaccagaacaggcgctcagggcaaaggtcaacgcacaggcagaaatgattgcagctgtctttttcatgattatctcctttagcaattaatgctattcaaacctcgatttataacaggctaaaacatccgcctaacactatttagcataacctgctttttcagactcgccaggataagcagacaaatctgatagatatcaacttccttgccctgccgatgaatttgcgcgacgatcgtagaatcgatatgaggaattccatgaacgctttcagtcctgcgcagtttcgcgcacagtttcctgcgctggccgatgccggcatttatcttgatagcgccgccacggcccttaaaccgcaggcggtgattgaggcaacccgccagttttacagcctgagcgccgggaacgtgcaccgcagccagtatgccgacgcgcagcgcttaacggcgcaatacgaagccgcacgggatcaggtcgcgcgcctgatcaatgctgacagcggtaagaacatcgtctggacgcggggcaccaccgaggccattaacatggtggcgcaatgttacgcgcgtccgctgttgcagcccggggatgagatcatcgtcagcgaggcggaacaccacgccaacctggtaccctggctgatggtggccgaacaaaccggggcacaggttgtaaagctcccgttgggtgcggacttcctgcctgacgtggcgcgtctgcctgagctgattacgccgcgcagccgtattctggcgctggggcagatgtccaacgtcaccggcggctgcccggatctggcgcgtgccattgagattgcccatgccagcggcgtggtggtgatggtcgacggtgcgcagggtgtggtgcattttccggctgacgttcaggcgctggatatcgacttctatgccttctcaggacacaaattgtacgggccaaccggtatcggcgcgctgtacggcaaagctgaactgctggcccggatgacgccgtggctcggcggcggcaagatgattaccgaagtcaccttcgacggttttaaaacgcaggatgtaccctaccgcctggaagccggtaccccaaacgtggccggggttatcggtctgagcgcagcgctcgaatggctggcagaaacggacgtggttcaggctgaaagctggagccggggtctggcgacgctggcggaagaagaactgaaaaaacgtccgggttttcgttcgttccgcgtccaggactccagcctgctcgcctttgatttcgcgggcgtgcaccatagcgacatggtgacgttgcttgccggatacggcattgccctgcgtgccggacagcactgcgcccagccgctgctggcggccattggcgtgagcggtaccctgcgcgcctcgtttgcaccgtacaatacaaaaagcgacgtcgatgcgctggtttccgccgtcgaccgcgccctggaattactggtggattaatgacaagttcagctttagccgggcacccgttcggcaccgttattactgaagagacgttaaaacagaccttcgtcccgctcacgcagtgggaagataaatatcgtcagctgatcctgctgggtaaacagttgcccacgctgtcagacgagctgaaatcacaggcgaaggagatcgcaggctgcgagaaccgcgtctggcttgggtttagcgtatccggagagaaactgcatttcttcggcgacagcgagggacgcattgttcgcggtctgctggcggtgctgttgaccgcaatcgaagggaaaagcgccgcagagctgctggcgcattctccgctggcgctgtttgatgagctgggacttcgcgcgcagcttagcgcctcgcgcggtcagggactgattgcgctaaacgacgcggtactggatgccgcccatcaggctcaggcctgacgttccgccttcgccatcatcttcttcagggcgtgagagaccgccacaaagccgaaggaggcggtcaccatggtggccgctccaaaccctgaggcacaatccatccgctttggcccttccgccgtgcttttcattgcacagaccgaaccatccgcctgcggataaaccagcgcttctgtcgagaacacacagtccacgcccagcttgcctttgctatttttcaccacgttgaagtcgctttttaagcgctcgcgtagcttagcggccagcggatcctgaatggtcttcgccagatccgccacctggatctgcgtcggatcaatttgtccacccgcgccgcccgttgtcaccagcggcaccttgtaacgacgacagtaagcgatcagcgccgcttttggccgcacgctgtcgatggcatcaatcacatagctgtagcctttgctcatgtactccgcgacgttatctgccgtcacaaagtcgtcgatcaccgtcacactacactccgggttgatgagacgaatacgctccgccatcacctcggacttcgccagaccgacgttatcacgcagggcgtggatctgacggttagtgttagtgacgcagacgtcatccatatcaatcaacgtaattgcgccaatgccggttctcgccagcgcttctgccgcccacgaacccacaccaccaatgcccaccacgcagacatgcgcatccgcgaacagttgcagggctttttcaccatataaccgtgccgtgccgccgaaacgctggcgccaggcatcgctgattaccacagacataaaacctcagatgtaaaaagggtgaggtattcctcaccctgaaccgtaatccgtcttgccctcagaataccacaatcagccgctgaatacgtttccggtacccggcgctgccttcagcacccacacgcgtccgtagtggttataccagcctgcacgatggccggcatccgggccgatgccctgataaatgtcgaagtgctggcctttgatcgccccacccacgtccagcgccaccatcaggcgtaattcatacttgccattgaatttgccgttgttgtcgaggagtggaacttccgccagcagcgtagtacctgccgggataatcgaacgatccgatgccacagaagcgcggccaatcagcgggacggcgctcgcccctttcaccggcgcaaagttctgcggtttgaagaagacaaacgatgggttctgctcaagcagctcacgcacttccgcttcgctgtgtttttcgccccactcgcggatcgcctgcatcgacatatcttctcgtttcacttcgccacggtcgatgagcaccttaccgatgctgcgataggcatggccatttttcccggcgtagctaaagaagttcagcggcgagccgtcgccaaaatcaatatagccgctgccctgcacgtccataatgaagttgtccatcagggagttgctgtaggccagcacgtaattttcgctcagcgcgccagcgtagatctcggcgcgggacggcagacgaccgcgtttcggcggcatacggtaaatgggatactggaactcgccctggcgtgtgtgtcgcgcctggacaaccggggtgtagtaaccggtaaactggacgttaccgtagttatccgccccctccatctgccaggcatcgataccaaactggcgcatattgcgggtatcaccgcctgcacgcagccagtcctgcacggcgctatagacgttgttctgcgaaccgtataaacgcggagaagcagtgcggatctggtagacctgctcggagaagtctccggcattgatcggagcgcccacggcgtctggctggttaactaaagagaaaggctgggataacttcccgtctttatactgttgaccgcgatcggtcggtttggaagagcaggccgcaagaatcgccaccattgcgcctgtcatcagatacttcgcccaacgtcctttcattatatctcgtcttttagttgcccaattccgcgagatgaagataacaaacccaccgtgttaatgaaatgcaatcgccttccctttggcaaattctgcacaaaaaatagtccaaagtggcttttgccgttcattttgcatacaaaataatgaattatgtgaaaaaggggttgcatcacaaacctatccgagtatagtgcgcttccacggacgcggggtggagcagcctggtagctcgtcnnnnnnnnnnnnnnnnnnnnnnnnnnnnnnnnnnnnnnnnnnnnnnnnnnnnnnnnnnnnnnnnnnnnnnnnnnnnnnnnnnnnnnnnnnnnnnnnnnnnnnnnnnnnnnnnnnnnnnnnnnnnnnnnnnnnnnnnnnnnnnnnnnnnnnnnnnnnnnnnnnnnnnnnnnnnnnnnnnnnnnnnnnnnnnnnnnnnnnnnnnnnnnnnnnnnnnnnnnnnnnnnnnnnnnnnnnnnnnnnnnnnnnnnnnnnnnnnnnnnnnnnnnnnnnnnnnnnnnnnnnnnnnnnnnnnnnnnnnnnnnnnnnnnnnnnnnnnnnnnnnnnnnnnnnnnnnnnnnnnnnnnnnnnnnnnnnnnnnnnnnnnnnnnnnnnnnnnnnnnnnnnnnnnnnnnnnnnnnnnnnnnnnnnnnnnnnnnnnnnnnnnnnnnnnnnnnnnnnnnnnnnnnnnnnnnnnnnnnnnnnnnnnnnnnnnnnnnnnnnnnnnnnnnnnnnnnnnnnnnnnnnnnnnnnnnnnnnnnnnnnnnnnnnnnnnnnnnnnnnnnnnnnnnnnnnnnnnnnnnnnnnnnnnnnnnnnnnnnnnnnnnnnnnnnnnnncacttcttaaaacaataaacaccctgaagggtgtttttttgtatctggcgtttgtgaaaatgccgggcatgatacccggcttaatgccctacccccgccgcgccagcgtttccccgtctgagaagtaggcccggatccccgccagaatcgactccgccacttcctgctggaatttagccgtcttgagcttacgttcctcttccacgttactgataaacgcggtttcgaccagaatggatggaatatctggcgctttcaggaccgcaaatccggcctgctcgacgctgtttttgtgcagcttgttgacccggcccagcttgcccagcaccgctttaccaaacttcaggctgtcggtaatggtcagcgactgcaccatatcaaacatcgtatggtcgacgtaacggtcgccacttttgctcacgccaccgattaaatccgaggcgttctgcgtgtccgccaggtatctcgcggcggtactggtcgcccctttcgttgacagggcaaacactgaagatccactcggctggcggctggtgaaggcatccgcgtgaatagagacaaacagatccgcgcgctgcttttgcgcttttgccacgcggaccttcagcgggataaagacatcttcgttgcgcgtcatgtaggcgcgcatattgccctctttgtcgatcaaggccttcagacgacgggcaatttgcagcaccacatctttttcgcgggtgcgatatttcccgacagcgccggaatcttctccgccgtggccaggatcgagcatgatcacaatcgggcgatcgcgccccgccttgcccggctgtgggccactttgcgctggcggaacctggctgtcgagatcgcctttgttgtaatcctcaagtaatgccaggagcggatcctgaatatccgtcgcattcgccggatagagatccatcaccagacgctccttaaaggcggctacaggcgcaagggcaaagagctgaggtttcacgttctgcttcagctcaaacaccatgcgcacggtttgcggatcgaactgcccgacgcgcgccgatttgataaacggatcgtcgccacggatctgagctgccatgcctttaagcacggagttgaggttcacaccttcgagatcaaccaccacacgttcaggattgctgagggcaaattgcttgtatttcagcacgcgattggactcgaccgtcacgcgcgtataggtcgacgacggccagacgcgcaccgcgactacctggcttgtggcggcaagacccacctggctgacgctaagcaaccacatcgccccggccccttttaacaggcggcggcggcttattgctgaattggatcccgacatgcttctcccgagcaagaaatctgattgatgaacaaaacgcccaaattgaccgaaaactttaacgaatgacgcataaactgtcatctataaaagggtaaacaatcatacgttaacgcacggattacttattattttctgtgggtcgcagaaaatttaggcttgcacacgcggccacaatcgaataaaaatacagaaattacgaataaacattcactaagggttgtgtcatggttaaggaacgtagaaccgaactggtccagggattccgccattctgttccctatatcaacacccatcggggaaaaacgtttgtcatcatgcttggcggcgaagccattgagcatgaaaacttttccagcatcgtcaatgatatcggcctgctgcacagcctcggcatccgtctggtggtggtgtatggcgcacgtccgcaaattgaagccaacctggccgcccatcaccatgagccgatctaccacaaacacacgcgcgtgacggatgcgaaaaccctcgagctggtcaaacaggcggcgggtctgttgcagctcgatatcaccgcccgcctgtcgatgagcctgaacaatacgccgttgcagggcgcgcacatcaacgtggtgagcggcaactttatcatcgctcagccgctcggcgtggacgatggcgtggactactgccacagcggccgcatccgccgtattgatgaagaagccattcaccgccagttagacaatggcgcgatcgttctgatgggccctgttgccgtctccgtaacgggtgaaagttttaatctgacctcagaagagattgccacccagctggccatcaagctgaaagcggaaaaaatgatcggcttttgctcctcacagggtgtcgtgaacgatgagggcgtgattgtgccagaactttttccgaatgaagcccaggcgcgcgtcgaagcgctggaagcagaaggcgattactattccggtaccgtgcgttttctgcgcggcgccgttaaagcgtgccgtagcggggtacgccgcagccacctgatcagctatcaggaagacggcgcgctgttgcaggagctgttctcccgggacgggatcggtacgcagatcgtcatggagagcgccgagcagatccgccgtgccaccatcaacgatatcggcggcattctggagctgatccgtccgctggaacaacagggaattctggttcgccgatcccgcgagcagctggagatggagatcgacaagttcaccatcattcagcgggataacctgaccattgcctgtgcggcgctttatccgttcccagaagagcagattggcgaaatggcgtgcgtcgccgtgcatcctgattaccgtagctcctcacggggggaactgctgcttgaacgcgtggcggcacaggcgcgccagatgggtctgagcaagctgttcgtgcttaccacgcgcagcattcactggttccaggagcgcggcttcacgccggtggatattgattccctgccggaaagtaagaaagagatgtacaactaccagcgccgctcgaaggtgttaatggcggacctgggataacagtcaccctctcctgctggagagggcgttcactcagacagattcaaatatcgcgcttaatccgcttctgcgctcagtacgggtggcaatcgcctgactcaacacgcgctcatccgcatacaatgacagacgctggcgcgcgcgagtaatggcagtgtagaccagctcgcgggtcacaaccggcgacagctgtgtcggcaggatcagcgccgcatggttgaactcggagccctgagatttatgtaccgtcatcgcccatgccgtttcatgctctggcaggcggctgggctggacggacttcacgctaccgtccggtagctggaaccagacgcgcagaccgttaccgcgatcgagcgcaatgccgatatccccgttgaacagccccagcgcactgtcgttgcgggagatcatcactggccggccctcataccatcgcgaatgcagctgacnnnnnnnnnnnnnnnnnnnnnnnnnnnnnnnnnnnnnnnnnnnnnnnnnnnnnnnnnnnnnnnnnnnnnnnnnnnnnnnnnnnnnnnnnnnnnnnnnnnnnnnnnnnnnnnnnnnnnnnnnnnnnnnnnnnnnnnnnnnnnnnnnnnnnnnnnnnnnnnnnnnnnnnnnnnnnnnnnnnnnnnnnnnnnnnnnnnnnnnnnnnnnnnnnnnnnnnnnnnnnnnnnnnnnnnnnnnnnnnnnnnnnnnnnnnnnnnnnnnnnnnnnnnnnnnnnnnnntcgcgaatgcagctgacggttaattttgcgcttctgcaccagcagctgctccagcctgtcgttcaggcccgtgacgccaaacggcccttcccgtaatgcgcacagaagctggtattcgccaaatgcggcgatgacctgcccgggctgactgcgctgctgcacgcagctcagaaaatgctggtatccctggagagcctcctcaagcatagcctgatactcttccccgctttgcagcgatttcttttcaatgtcagtgaaggtaccgtcaaacaccgtgcgcgtggcgtgcctgtcgccacggttgaccgccgcagccagctggccgatgccggagtcgctaccgaaacggtagcttttttgcagcaggcacaggctgtcacgcagtgcgcccgcgatcggcgtgtgatcgggttcaagcgagcaaccggtcagacgggcgagctcctgcgcccgcgcggcggtataaccgtaactggcgtaggtacagatatctcccagcaccgccccggcttctacagaggcgagctggtcgcgatcgcccaggaaaaccacgcgcgcatggggtggtagcgcatcgatcaggcgcgacatcatggtcaggtcgatcatggaggcttcatccaccaccagcacgtccagatgcagcggattgcccgcatggtagcgcagccgctggctacccggctgcgcgccgagcagacggtgcagagtacttgcttcacccgggaaaagcgcaagctgctcctgggtgagcggcagccgttgcatcgcaccgcccagtgattcggtcagacgcgccgcggccttcccggtgggcgccgccagacgaatacggcatcgctgctcgcctgaaagctgtatcagggctgccagcagctttgcgacggtcgttgttttcccggttcccgggccgccggatatcaccgagatccgccgcgtcagggcgacggctgccgccactttctgccagtctgtggcctcaccggagtcaaacagcctgtccagcgtctggcgaagctgtgcttcgtcgcagggaagcggcgcattggtctcactaaagaaacgcgctaccgtcagttcgtttcgccacaggcggttcaggtataagcgctcccccgtaaggatcagcggtgcctggttgtctcccggcccgacggctgacgattcacgcaagattttctgccagtccaccgtctcccccagcagcgcaaagcaggactggaggacaggcggcattttctcgtcaaccaccagacgcgagagcggcagacacacatgcccctctccggcgtctttactcaacagggcagcggcaagcatcacggcgggctggtcagcggcaatcatcatggcaaactgcacgtccagctgacgcagcacgcgttgctctaccgcatccagcaataagtcctgcatcgtcatgccatctcctccgtgtttgctgcaaacaggttatccattttattaatcaattccgcatccggacgagtgctgaagatcccggagcgcggatcggcagcatcaaccccgcgcaggaacagatagatgacaccgccaaaatgatcgtcgtagcgataatccgcaatacggtggcgcaaatagcggtgcagcgccagggtatagagctgatattgcagatcgtagcgatgcatttgcatggctgccgccatcgcctgctgggtataggcttcgctgttctcgcccagccagttcgatttgtaatccagcaggtagtaccgtccttcgtgacggaagaccaggtcgataaaccctttcagcatgccctgcacctgacggaagttcagcggcgggcaaccggctgacagcggatcgtactgacggataagcgcatcgagcgcgtcggccttaagcgggcctgcgacaggcagataaaactccatctcaacctgcttatttctggccgttaactggcgaagagagaagccctgcgtcgtcagcggcgcctgcaaaatggcgttgatccagtcagtgagaacgggctgccagtgcgcgtcatagcctccgctctgcaacatcttcagcacccactcctcactgacaggctgggtgaaatcaagctcttcaaagaggctgtgcaaaaaggtgcccggcgacgcgccgcgtgggaactgatgtggagttaacgtcggttcaaccggaacatcgcccacccctgcggcatccacgtccagcttcggcatgagatcctgcgcaatactttgcccgtgctgttgcaggccagaatagctggtgacgcgccagtcgtcggcaagcacccgtgtgatctggcgcgcgttaagatcggtcgcgggctcttgcgccatttcccagcggctgttgtctggcagagaagggatatggagggcgatatcgtctccgcaaagcgactcaatacagaggcgcaaccccgccgcatctttaggctcaccacgctgaataagccgccctaaggcgcttaaatggaaatcgctctcccctgttttctccccgcgacggcggaaaaccggcgcgacgcccaggctgcaatgccagacagaacgggtcagcgccacgtaaagcaggcgcaaatcctccgccagacgctccgcttccgccagctcaacgctggtttccgccttgctgagatcgagcaccgcatcgaaagtctcgcggtcatgataataggcctgatcctgaacgcggtagttggcgataaagggcagccagaccagcggatactcgagacctttcgatttgtgaatggtgacgatttgcaccagatgcttatcgctctcaagacgcatctgctggcttgaggcgttactgtttggatccgcgatttgctgcgccagccagcgcacgagggcatgttcactttcaagctgggtgccggcttcctgcaacagttcgctgatgtgtaaaatatcggtaagacgcctttcaccgcccgatgacgccagcatattttcggcaatctggcgccgcgtcatcaattcgcgcagcatcgccatgacgccgcgtttttgccagcgttcacggtaatggacaaactcttccaccaccgtatcccatgcgttttcgtcatggttgagctcatcaatatcgcgcgcgttcaaccccagcatggaactggccagcgcgcttcgaagcgtattttcgcgctccggggccagcaccgcctgaagcagccagagcatttcctgggcttccagcgtgtcgaacacgctgtcgcggttagaaagatacactgacggaatatccagcaacgttagcgcatcgcggattagcgccgcttcctgacgactgcgcaccagcacggtaatatcagaggctttaactggattcgcctgttcccccttccacagcagcgcctcgccgcgcgcgcctgcgctcagccagtcacggatttgcgcggcgcagtgctgggccatcgccgcctgatagtcggcaaccccatagccttccccttccagcagccagaaggtcatggcgggttgcaccgcgctactgacttcgaagcgcagggatgcgttttttggggcggatttcaccggcaggaaagggatttcattgaacatgaacgccgtctccatacggctgaacagcgcattgacgctctcaaccatccccggagcggaacgccagttagtgtctaacgtgtaatgcgcgacaacctcactacgggctttcatataggtgaagatatctgccccacggaaggcgtaaatcgcctgtttagggtcgcctatcaacaacagggcagtgtcgggctgctgtcgccagatgcggcgaaaaatgcggtactgctgagggtcggtgtcctgaaattcgtcaatcatcgccaccggaaaatgggtacggatcgcgctggcgagcgcttcaccattctcgctggacagcgcctcgtccaggcggctcagcatgtcatcaaaccccagctctccccggcgacgtttttcgcgcgcgacggcctggcggatctccgtcatggcgcgggtgatcatcaggtcattgagcgttaatggctccgcaagcagcgcatcaatcgccacaaacaggggatgctcaggcacaatgccgtcggctttggttcgctcagtcaaaaagcgctgcgaaaatttttccagtgcgtccggaagctggtagccccgcgtctcctcctgggcccaggcgctgatcttttcgatccacttcccctggttcccacggttgaacttgcgtctgtcgatgcctgagttttcgatgattgcatcaatttcaccaaccgactcattccacttctgcttaagcgccgcaattttggcgacgatcttttcatggcgcgaggccagcgtttcatcggcaggcggcggagatttaatgaccggcgcttcgccttgcaggtaacggtcgatggcgcgaagaagctcttccggacctttccacagggcgtgaaccgcttcggcaatgtcgcgctgcaatggataacagtgacgacgccagaaatccgcacaggcctgatagcgaagctcggattcatcttcaataagctgctgctcaaagagcatgccggattcaaacgcattcaggcttaacatgcgctgacaaaaaccgtgaatggtgaagacggacgcttcatccatttgccgctcggccagcagcagccattgcgcagcctgttgcttatccgcaatctcgtccagcaggctcgcgtagagggggttatccgttgtctgacgcaaacaggcgatgcgcagctcatgaatgttgctgcgaatacggccacgcagctcggcagtggccgcttcggtgaaggttaccaccagcagctcttccacgcttaacgggcgcgaaaaagcggcgttgccgccgagccccaacagcagacgcagatagagcgcggcgatggtataggtttttcccgttcccgctgaggcttcaatcagtcgctcaccctgtagaggtaaacttaggggatcaagcggctcagcggtatgggtcattctttcttactccagggcatagtttgttgcagcgcgctgacgctcttccagacggtccactcttttgattttacgtagtccgttttcccgttctggctgccagaaacctgagacaggatggccataccctgcggttttactaccgcctgatggaagaaatcggcaaccttttgtggcgtcagctgttttatttcggccactattttatcacgcgaatcaaatttcatattaccgcgatcaaaatctttgctcagctgcgaggcctcttcacccagcgtctgcggcggctgcatcacctgggcgataaccgcctgctggatctgggcaaactcttccggcttcatggcgcgcagttttgcttccgcctgcgggaagaacgcctgataacgctgccacaggtaagcgggttgcttgtcgctgctttgcagaaggaagcccagcccccactgacggcccacattcatagagaaagcgaataccgcatagcccagctgctcttcggtgcgcagctggttgtaaaaccacggctgaataatttgaccaagcaccgcactctgggcagagctggtaaattcgtcataaccgacagggacaaacaccgcggccagcgcggaatccgtgctgcttcccgctttttcgaagatcacgttctgctttttctctaccagcacatcctggttacggcaccactcatcgccttttgaacccagttgcgcacggacgttttgcgccagcgttttagcctgatcttcgctcatattccctacaaccaggaactccggacgggtattggttttcagcgcatcacggtaagccagcacctcttttaaggtgactgagggcaataacgcgcggcgatcttcgcgctggaagtacggaatttgcgacagcatctgtgctggcataatcgcctgatcgtaggctttacccttctcggcagaatccatcatctgggcataccaggacttagcctgctcgagctgttcttccgtaggcgtatagctgaaataaccgtccagcagggcctggaacagctgcggcaaacgctgggtatagccgttggcattcaccatcaggccgttattggcgttggtggagaaactgataccaccaacggcagcctggttgctgagctgatcgagagcaataccggccagataatcattaagcgcaaacagcacctggtttctggcactgtccattgctttggggttacgcagcaccacgctgacatccgcttttggctcgtcggcgaaatagcggcttggggtgtagaccacgcgcagcgtcggctcatcaacaatcagctccgggtgcggatacgcctttgcgggtttgatcagcgagaaatcgtccgggatgtaggggttaagttccggtaacgtcagcgcaatttcccccgcctttttctgccagcccgcgaaggtcttttcgctgattttttcaacctgatacggggcatcaacgaagtaggccattttgttatgcggttcgttcgggctgatataccagacgcgggcattctgcggagtcatcatcgccagacgcgctttgagcgctccggcgtcatactggtcggcaatatttaccgcatccagcgtatgttccaccggcacgcggatcatggtatctgccagccactcaacgtagtccatatcacgcgtgatagagggatagcggaaatcgagatccagcacgtgcgccagctcgtcaaagtagcgtttatcgacgcctttatcgcgcagcagagagaggtaactgaaaatggccgcaacgacgtcgtcccggtgagccagccctttatcggtcagcgtcgcggagatggccagcacgccgctattcccatttacaacgggatcggagtcagcgcgaataccttccaccagcccctgcttttgcagccagtcggagagcgtacccgggctgcggttgccgataagatacgtcaccagctcgtcggttttgctgcggaactgcgccgtgttgttatcaatacggaattcaacgcgtaacaccttgcgcggcaaggccggcacatagtgaataacaatgcctttttgcgcgtccgtgacaaccggcacgttaatctgcggcagatcgatatttttatttggcaccctgccgtaggtctgcgcggccatgtttgccagcgtcggcaacggtttattgctgtagataaccgctttcatcagattggcggaatagtatttttcacgaaacgcatgcagcgcatcgagcaccgggctacctggcttgtcgctcagcgtttcaaggttgccgcctgagaagcgcgaacccgggtgcgccggattgatggtttcagcgctaacctgcgccatgcgcataccgtctcgcgtgcgcgccatcgtcagttcggcgttcacggcattacgttcacggtcagcgtattttttatccagcagcggtgcggcgatggcatccgccagacggtccaccgccccatcaagcgcatcattttccacttccaggtaaaacgcggtgcgatacggcgcggtactggcgttgtggctgccgccatgcattttcagaaattcggacaggctgtcaggctgtgggtattttttagagcccatcagcgtcatgtgctcaaggtagtgagccagtccaggatgggcgtcaggatcttccagcgaacccaccggcacaaccagcgcggagagcgatttcaccgcctgaggatcggaaaccagcagcacggtcatcccgttatcaagacgaatcgcctgatactcacgggtgtccttatcgctcttacggattgtttccttgacaggttgccaaccggaatcggcctgagtgacgggagcccaaagggcgataaacaaaacaaacgctttgaacaaggtgctgcctggcattacgacctctttatcacggctacatcattaacaacgtgcgtgctggacacgccagcatctctttctttgggtacatcagtccgtgataagaggtgcatcataaatgaacacctcatactgcgcaatttttatacagcactcaggactgattaaatttgaacaacggtaacaggtagcgttgcgcctcctgggtgataatgtcgaaatattctggctccagcgttcgccataaacgttgataccagacatcgtcaccttcgccacgtaccatcatgttcccttcgtaggcctgcaaaaacttgctgcgcgctttctggagcgaagcctcatccgttaacatggcatcattctgcgcgtcgtaacaggcttttatccacgcccctccactttcaggcagcaaaagcagaggtttgttcatgccctgacggtaaccttcaatataaagcgacagatacgtcaacgcctgctcaggctccatcggcgggaaacgccattcgccgtccttacgtacaaacaaccggctttcaccttcgtgaccactcgcactgtagacaagatgttcgagccagagttgcaggccatgtgaaacgctgagcatggatggccgccagcgcagcagcccgtcagactgcacgtgcgtgagccagccgctgaggtgcataccgttacaatcgagatcgatttcaatgctgctcgccggctgccgacacgcgataacgcggtcagcaagcgctcgcatctcctcgcactgggcatcccagacgatttcgccgaatgcaccatacggaagtaatcccgacgccctgtaacgtcggaacagtttactggcgtcttcttcgtcaaccagcgcattcagaagctgggaattaagcttaaaacgctccagcccatcaagaataaacggttccgcatcggggatttcgctctcttcagagcggaaattcacctgcaagcgttgctggaaaaaagcccggaccgggtgcgcccaaaaacgctgtagctgctcaaacgagagggtatctatgacgcgcggttcgagcgtctgaataaaatcggtttgcggcgtccccgctttcttcgcggcgggaagccactcgcgggcgtagctttgcagttcatcaggaacgtaattgacaggatcaaacggcatacggctatggtgacaggtgatatgcgctatcacccgacgttcgctttcgtcgcagttgcaggcttcatcgcccggcagatagtgactctgtccgatgtaatccaccagctcctgcaccagcacagacgggaaacgctcgctgttgtcctgaattgaacgaccgatatagctgatatacagcctgctttgcgcagacatcagcgcctcaagaaagagataacggtcatcatcgcggcggctgcggtcgccccgcttcggttgtgcgctcatgagatcaaaacccagaggtggaagcgcacgcggataaataccgtcgttcatgccaagcagacagaccactttgaacgggattgaacgcattggcatcagggtacaaatattcaccggccccgcaaggaagcgctggctgatgcgctcctgatcgagacgttgcgtcagctcatcacgcagaagcgaaagaggaaccgcctcgtgatagtgcgaattaaccccctcatcaacgatggcctgccactgcttctcgataagcgccatggccgcttcagtttcgctgtccggcaggaagaaatcactcagcatttcgcggcaaatcggcagccactcttcgagcgggcggggctgcatcaacgcacggcgccagcggttgagctgcataagcagcgaggctaagtgaccaaccagttccgcgatcaacccactggactcatcgtacggcagcacgtcattccattcgccgtggatgctctccatcgcataccccagcagcatgcgcgtcaggccaaactgccaggtatgctggccggtcgcaggcagttcgaactcctggacgttatcatcgtcgataccccagcggacaccagattcgttgacccactggcgcagatagcgcaacccctcttcgttaatgttgaaacgtgcggccagaacaggcacatccagcagtgccagcacatcctcagagataaaccggctatcaggcagcaaaagcaggctgagaaaggcctgtagcgccgggtgtgactgacgagcgcgacggtcagagattgcgtagggcagatagcggtcgcccgttgcgctgccaaataccgcctgaataaacgggctgtagctgtcgatatccgccaccatcaccacgatatcgcgcggtgtcagggttggatcgtcctgtaacatggccagcaggcggtcatgaagaatttcaacttcacgctgtgggctgtggcaaacgtggatcgcgatactgcgatcgtcaggatccagttttcgcttcttatcgcttcgcgcaaactcctcggcggtgatcccggcaacggcacggttttccaaatccagaatatcaagctgaatattgtgcagcaggctgtccggcgtaatatccgcaaacgcatccacatccccttctcccgaagaggtgatatctgaaagcagataaatatagtcgcgtccgagcttgccccacgaggcaagcagcgggttcggcaggttctgaatcccctcttcatcaaaaagctgcgccgcgttttcactgtctttaaacagcggcacggcgcgctcttcaaagaggcgctttctctggcgggtgaccagccgtgaaagccagcgcggatcctgaatatccccccaatagtgtcgacacgggttggtaaagaggatatggatatcagtgtgcttaccgagcgcttttagcgcgttcagatagacaggcggcagcgcggagataccgcaaatgaacacgcgtgacggcaaacgggctggccgttctgcgctgttctcaagtattgagataaagcgatcgtacaggttagcacggtgccacttaggctgaccgagtttcccggtatgctcgaccagcgctttccagagcggcgcctgccagatttgcgcttccggtaacccatcgactaattctcccgcttcccagcgaatcagccattctgcacggtaaaccagatactggtcatagaggtcggcagtgcgtgaggccagctggaaaagtttacgcttgtcggtgtcgtcattcaggtagtgccgcagcatggcgaactcatcatgcgccagcatgtccggcagcagcgtcatcagtttccaggccatgctttgtttgttgaaggcgctctgctcagggatatccggcaggacgcgaacaaacatctcccagataaagctcgcgggcagcggaaaatcgatgttcgccgcaatgccaaatttctgcgaaagggacatttgcagccactgcgccataccggtgctctgcaccagcaccatttctggctcaaacggatcgtcaagacgctcttgctcaacgatatactccatcagtgcttccagcacatccagacgatttgagtggtaaacccttagcataaacgctcccgactagcggctaaccgggcaatgcagacgcgtcaacgcgccctgccgccccataggagaaataagtgtgaccgtgatgctgacacatccggactgtgttgtctgcccccgactgacctgccagcccggcgggagcgttaatgttgagatctgcgactgattccacgcatgatgccatagctgacgatactggctaagcgccgcataccgggctgccagcgcgcgatgatagccggataacgccatcacaaccacaaccagcaacatcattgccagcaaaacctcaaccatgctaaatcctttttgtctgctcagggtaactgacatagcgtactttccttaagggggcagaaatcactccagccgtgggcggaaaagcgtatctgcccctccgagatgtccccgcctcgccatagcaatagattgtcattgccggcaataagcaacacacgcgccccaaacagccttatacagacccgcaaacgttgtgtctgtttgcactgaacctctggctgtaaagcccattcctgaacgcgcccccactccagtgcagattgcacggtagcctgctggcgaacagacaaactctcgccacttaccagcgtgctaaaggtttgcagctgctgatttaatccggtgaggatcagcgtgccgagcaccagtaatagcaggaccagcgccagcgatgacatgccccgctgacgattcacagattaaaccccgttacggtatggcgagccgaaaagggtgcggccagttcacctttgcggcgggcacgcagctcgatactgatgaccggcgcaaagccatcatgatcggttttagtgaccataaattgctctatcaggacccgatccgggtcggtgagcttatcccatcccttaccgtcacaggatgtggcgccccgcagcgtttcaagcgatccggactcaagccggaatcccgtactgtcgttttctgatgcggtgctatcccactggccgttgctgttcgcatcccatagcacaatcgcacatcgtccttgcctgccgatgatcatcccctgcccctggcaatgccctgcacaatatcctgccctctgaaactgtttaccgatcgcgaacagacgttgccagacctcatcctccagctcctgctgtccggattgcagtaaaacaccccgctgtagccccggtaaaaaacgtgacgtgctgagtaacagaatgctgcttatcgtcatcgcaataagcacttccagcagggaaaacccttttcgatttactggcatgcaccttctcctgcggcattacacagcctgatacgtccgccatttgagacaataacccaccactcaccagcgcggctctgcacgcggatatgtccggcccatgcggtatcccttaaaccgtaaaatcccagcgcaggggttatgtcgcttatcgtgacctcgggccacatcggcttcatcacgaacggtccgccgctgtcacaaccggtcaccgctgaactggccagacactccttttcaccgtcgttatacagcgcgatcctgtgctcgctgttgtgacggttggcgtcattgcgcaaaaacaccaggtaatcccgcacctggcaggcggtttgccaaagccgctgccgctgctgccagctgtcccagacatagagccctgtggcgctgaggatcactgtcagcgaaacggcgataagggtttcgataagcgtaaagccttgttcgtttttcatggcgggagtgtggcggaatagcaaaaacggtgcgagcgtcaaaccagaactttacgagccgctttccggagattttcacccgttgcaacgcgttgcatcatctctggaaacaggctcgaaaaacaaaacgggcgtgaaaaaaaaccggcgctaaagagcaccggttgtgtcaggatttgccgtatcagatggcgacaggagctttaatgccgggatgcgggtcgtaaccctcaatctcgaaatcatcaaaacggtaatcgaagatcgattccggtttacgtttgatcaccagcttcggcaatgcacgcggttcgcgcgtcagctggagatgcgtctgttccatatgattactgtagaggtgggtatcaccgcccgtccagacaaaatcgcccacttcaagatcgcactgctgcgccatcatgtgcaccaacagcgcgtagctggcgatgttaaacggcaagccgaggaacacgtcgcaggagcgttgatagagctggcaggagagcttgccgtccgccacatagaactggaaaaacgcgtggcaaggcgccagcgccattttatccagttcccccacgttccaggcagagacaatgatacggcgcgagtccgggtcatttttcagctggttcatgacggtcgtgatctggtcaatatggcggccgtccggggtaggccacgcgcgccattgcttgccgtagaccggccccaggtcgccgttctcatctgcccactcgtcccagatggagacattgttttcatgcagataagcaacgttggtatcgccttgcaggaaccagagcagttcatgaatgatcgagcgcagatggcagcgcttcgttgtcaccagaggaaagccttcttgcagattgaagcgcatctggtggccaaaaatggagagcgtaccggtgccggtacggtcgtttttcggcgtgccctcgtcgagcacttttttcatcaattcaagatactgtttcatgattcctcaggaaagttgttgctgtggacgacgacgatacgcccaaatcatcataatggcacccgcgacaatcatcgggatggagaggatctgccccatgctgatgtactgtacccattccccggtaaactgcgcatccggctggcggaagaactcgacgatgatacgaaacgcgccgtagccaatcaggaacagaccggagacagcccccattgggcgcggtttgcggatatacagattcaggatgatgaacagcaccacgccttccagcgccagctcatagagctgtgacatatggcgcggcagaacgccgtaggtatcgaaaatggactgccactcaggatgcgaaggcagcagcgcgatgtcctccgcgcgggaacccgggaacagcatggtaaacggcacgctcggatcgacacgcccccacagttcaccgttgatgaagttgccaagacgccctgcgcccagcccaaacgggattaacggcgcaataaaatcagccacctggaagaagttgcgtttggtgcgtctggcgaagatcaccatgaccaggatcacaccaatcagcccgccgtggaaagacatgccaccgtcccagacgcggaacagatagagcgggtcgttcaggaataccgggaaattatagaacaggacataaccgatgcgaccgcccaggaacacgccgaggaagccggcataaagcaggttttccacttcgttcttcgtccagccgctgcctggacgactggcgcgacggccagcaagccacatggcaaagacgaagcccaccaggtacatcagaccgtaccagtgcagcgctacaggtcctattgagaaaataaccggatcgaattccggaaaatgcagataaccactgttcatctgtcaccacaagatgttgttattccgctgaaagtggacagcgggtgaattgcattcccgccgttggcaggtgctccaaagttgcgaatcatagcataaggcaggcgtggaggatgcgcctgagatgtaaaagatgtgtatagggtttcatgcgcgctgttccccctcaccccatccctctccctcaagggagagggggtcgtcggagccgtcattattttgtggggatcagcggccgccccggatcaaaccgcccatgccgcgtcgctccataaacgcagccacctgatggcgcacttcggctgccagctgtgcttccaggctacgcgcggccagttcgcgcgcctcatcttgttcgatgtgacgtaacaggtatttcacacgcgcaacggaacgtccgttcattgacaggtgacggaaaccgagaccaatcaggatcgccacgcacatcggatcgccggccatttcaccgcacaggcgcaggtcgatattatgctgctcggcttcgcgggcgatcatcgccagggcacgaagcatcgccggatgcaggctatcgtagatgctggcaacgcgcgtattgttgcgatcgaccgccagaatgtattgcgttaagtcgttggtgccaacggagataaaatcaacgcgggtcgccagctgcggcaacataaagaccatcgaaggcacttcaagcatcacgccaatacggggtttagggatcgcatagccgatcatctcttccacttcgcgccctgcacgttctatcaaccgccgcgcttcgtcgatctcgtcaatactggtgaccatcggcagcaaaatgctgagattccccgtggccgcgttggcacgcagcatcgcacgaacctggataaggaagatttccggctgatcgagggttatgcggatcccacgccagccgaggcagggattctcttcactgatgggcatatagggcagttgcttatccgcgccgacgtccagggtgcgcaacgtgacgggtttatcgttaaacatctgcaacatgccctgatactgcgccacctgctcctcttctgacgggaagccgctttgcagcataaacggtatttcggtgcggtagaggccgatgccatcgatgcggctgccgagcttctcttcatgctcagggcttaagccagcattgagcatcaccttcacccgctcaccgctcttgagctgcgcgggcaggttgacgtcatcttccgccagcttgcttaattcattctcttcgctgataagacgctggtactcctgaaggagaaccggctcaggatccaccagcaactcaccgcgatatccgtccaccaccagcgtacggcgatgcagtacggagggctgaatatccgcccccatcacggtcggaataccgagcgcgcgcaccataatggcggcatgggagttagctgcgccatcgcgcaccactacgcccgccagcctgtcctgcggtaattccgccagcgtcgtcgccgagagttcatcggccaccagtacaaaccggctcggccaggcattcgccccctgaatagtatcatcaaggtggaacagcagacgttgcccaagcgcgcgtaaatcgccggcgcgctctttcagataaccgtcagtcagcaccgcaaactgctcggcaaatttttcaatgacctttttaaccgcccactctgccaccgaacctttatcgacctcggcaaataactcacgacgcaaacgcgcatcggaaagcaggtgtgagtagaggtcgaaaatggccgccgtctctttttgagcgccagcggcaaagcgtttgctgtagcgacgaaactcattcgccgcctcttccagcgcagcggtaagccgttcgcgctcaagcgcttcatccagcgtcgaggcttcgtagacctgctccatcagcgggagcgtggcatccatccagccttcggcaatcgcgacgcccggcgaggccggaagcgcacggatgcgggtatgacgatactgcccaaaaagggctgccagctgagactgggagaggatcgcagccatctgcgttgccagcgtgacgaggaaagactcctcgctttcatcgtactgccgcaactctcgttgttggacaacaagcacgccaagcagttgacggcgctgaataatcggcacgccaaggaaagcgcggaaccgctcctctttgacggaagggatatatttgaaactgggatgtttttgcgcatcggcaaggttgattggctccgccagtcgcccgaccaggccaacaataccttcatcaaacgcgagcgtgacggtacgtccccgtggtttttttaaaccgcgggttgccatcaggtagtagcaacgtcggtcatggtcggccaggtagaccgaacagacctcggtttccatcgcaagacagatgtccgtcaccagaatattcagcgcctcgttgaggcgaggcgcactggcaaccttttcaactatttctcgcaagcgggtgagcatgatttgcgtagcttaacctcttttacgtcgccaggcaggtgcgctctgtggcttcggaggcgtctcctgaagctgcatcacgacacttgcgaactctttcatcaccctacgatatacatcgcgcttaaatgacacgacctgacgaaccggataccagtagcttacccagcgccagccatcaaactctggcgtgctgctggtttgcatattgatatctgaatcgttgcccaccaactgcaaaagaaaccacttctgtttctggccgatacaaaccggctttgtgtcccaacgcaccaaacgtttcggtaacttgtaacgcaaccagttgcgggtcgaagccaggatgcgaacatcttttcggcttaaaccaacctcttcaaacagctcccggtacatcgcttgttctggggactctccgggattgatcccgccttgcgggaactgccaggagtgctgaccatatcgccgggcccacatcacctggccctgacgattacaaattactattcctacgtttgggcggtagccatcgtcatcaatcaccggactaccccaaactaaatctgatatatgaatgattgtttcacactacagggaggcggtaaaccactctcttacaggcctgcaacctaataacatttgaataactcacaatttagtgcggagttataaacagatgcgggcgacagagaccatttttattcaccttttctgtggatatagttgtgaagaagtgcggaattaccgatgaacaaccttgtagtccgacgagccgccaatttaccccgcttataacaaatcatttaaattcatatgattatattgaaattaagggtatccagggcgataaacgtgacgatcatcacatcaaagatcctcctgctgatgaaagatcgaacagcgtcggttttatccacagtttgtgccaataagttaggcacaatttgtgtgaaaattcgattttcatcgcacgtcaaggctgtaaattgaaacagtagtggcagttattcccagttatcccatttttctgtggataacatggtgtaagatcctgtttattgtcagtgaccagaattgcacaacctgttttttagccgccgcgggacggattacattctaaaaaagatgatataaatcatccacatggaatagatgcacagaaaaaggtaaactctgtccacaagggataaaatatcagctcattttttaatcaaaaggtcgttagcatgcattctctcgccccactgctctctcctcccgtcagtgaagcccagttgctccagcaggcacaacgcctggcaggctattcactgggcgagctggccgtgatggctgggttgacgatacctaacgatctaaagcgtgataagggctggatcggcgtgttgctggaacgctggctgggcgcaagcgcgggcagtaaacccgagcaagattttgcggcgctgggggtggaactgaagacgatccccatcgatagccaggggcggccgctggaaaccacctttgtctgcgttgcgccgctcacgggtaacagcggagtgacatgggaaaccagccacgtcaggcataagctgaagcgggtgttgtgggtacccgttgagggcgacaggcagatcccgctggctgagcgtcgcgttggcgccccgctgctctggagcccgaatgaagaagaggagagacagctttcccaggactgggaagagctgatggacatgattgtgctgggacaggttgagcgtatcaccgcccggcatggcgaagtgctacaacttcgtcccaaagccgccaacagcaaagcgctcactgaagcggtaggcgcacagggcgaaccgatcctgacgctgccgcgcggtttctatcttaaaaagaatttcaccggggcgctgctggcacgccacttcctgttgaaaacatagttttttactaattttgcgctccggctaacataatctcctcctttttaagatttcccccctttcacctgtcgtaatatcaggttattactacactatgatttgatacgagccaggtgaggatgagaacgatgaaaaaatgggcagtaattatctcagcagtcggtttagcgtttgcggtatcgggttgcagcagcgactatgtcatgtcaacgaaagatggtcgtatgatcctgaccgatggcaaacccgaagtcgacgacgataccggtctggtgagttaccgcgatcgcgaaggcaatcaaatgcagattaatcgcgacgaagtctcccagatcatcgagcgttaaacagataaaggtcagtagcttgctggcctttttgattttttccttccccttttgccttccctctgccatgtttatattcctttgtcgggaggttcctgacgcagtctgtatgtctaaaaaaggaaaccggctatgcattatcatcgtatcccccacagcgctctggagatcagccaactggggttgggcaccatgacatttggtgaacaaaacagcgaagccgatgcccatgcacaactcgattacgccgtcagccagggcattaacctgattgacgttgcggagatgtaccccgttcctccccgcccggaaacacaaggtcttactgaaacgtatgtcggcaactggctggcgaaacgcggcaatcgcgaaaagctggtcatcgcctccaaagtcagcggcccttcccgtaataacgatgccgggatccgccctaaccagatcctcgatcgcaagaatatccgtgccgcgctggatgccagcctcaagcgcctgcaaaccgactatctcgatctttatcaggtgcactggccgcagcgtccgacgaactgcttcggtaagcttggctacacctggaacgaaagtgctccggccgttaccctgctggaaacgctggaagcgctcacggagtgccagcgggcgggtaagatccgctacattggcgtttccaacgagacggcgtttggcgtgatgcgctatctgcatctggccgataaacacgatctgccgcgcatagtgaccattcagaacccgtacagcctgctgaaccgcagttatgaagtgggtctggcggaggtgacgcagtacgaagaggtggagctgctcgcctactcctgtctgggcttcggtaccctgacgggcaaatacctgaacggcgcgaaaccggctggtgcgcgtaacacgcttttcagccgcttcacccgctatagcggcgagcagacgcaaaaagccgttgcggcctacgtggatatcgcgaaacgccacggactcgatccggcgcagatggcgctggccttcgtgcgtcgtcagccttttgtggcgagtaccctgctcggcgcaacgacgatggatcagttgaaaaccaatattgagagtttccatctgaacctgagtgaagaggtattagcggagattgaagcggtgcatcaggtttatacctacccggcaccgtaataaaagcaaaacggcaacgtgcgttgccgtttttagggttttcaccctctccccgtgggagagggccggggtgagggcatcaggccgcacaattcaacgacgacgctgccagacccacagcccgctaatcgccagcgcgaacagcgcgccgaatcctaccccgattgccacgaccggcgcacctgcttttaccgccagcgagtaaattcccagcatcagtaacatcgccatgttttcaccaaggttttgcaccgcaatggcgttacccgccccaacggtctgcttgccgcgctcctgcaacagcgcgtttagcggcaccacaaagaaaccgcctaacatgccgatcagcaacagcagggcataggcaggcaatagggcatgttgcagggagaagaacagaacgccgacgccaatcaggatccccgcaggcatgcagcgcgcgacggtttccagcgtcaccagttttgccgcagccccggccccgacaacaatcccgacggcgaccatggcattcaggtaagtcggcgtggcgttgtcagtaatgcccagcgccaccggcacccacagcaccagcaggaaacgcagcgtaacgccggccccccagaacatgctggtgcccatcagcgagaagcgtgtttcaccgttacgccacagtacgcggcaggcgttgaagaagctgccggtcattggcccgaagcgccaggattgccccggacgcgccacggccagtttggggataaacaggttggcgatcaccgcgccaccgtacatcagggcgcagatgccaagcgcggcgagcacatgccagtctgccagtacgcctcccgccaccgagcccagcagaatagccgcaatggtggaggactccatcaggccgttggccttcacaagcttatcaccggtggtgagctcacccagaataccgtacttcgccggggagtaggctgccgcaccaatgcccaccagcgtgtagccgacaaacgggttgataccaaagcagatacttgccgcgcccagaagcttaaggctgttggcaaacatcatgacacgacctttcgggaagctgtccgccacctggccgacaaacggcgcaaatacgatgtaagcacccacaaacaccatctgtaggatcggctggctccagtcgggataaaactcagctttcagcaatgccagcgtggcaaacagcaacgcgttatcgccgaacgcggaaagaaactgggcggcgataaccgccatcatgcctttcgaccagattgaagtgttagtgtgcactgactcacgcattttgctgttctgcctcttcaaccatgcccttcagggtcacgaaatcgggtttaccgctgcccagcaccggtaactgtttgaggtaacgaatatcgcgggggaccgccagctcggggataccgtgttcgcgtgcatacctgagcagtgcgtcacgcttcagttcaccgtctgtcgtgaagagcaccagcgcctcgcctttactggcatcacttttcaccacggtcgcatgcattttctccgccgagacggcggtcgccagcgtttcgaccatttcaagagagaccatctccccggcgattttggcgaagcgttttgctcgtccctggatctgcacgaagccctgatcgtcgaagcgcacgatatcgcccgtgtcgtaccagcccgtttcaacctcgccattgacgttctcggccgtcggcgcctcaagcacgcccgggttttccatacgcagatagccgttcatgacgttcggccctttcagctgaagacgtccgccgtcttcaatacccggcaccgccagcagacgcgcatccagccccggcagaatgcggccaaccgttcccggttttgccgccatcggaacgttgatggagaccaccggcgcgcactccgtcacgccatagccttccagaatgcgcaggccaaacttgtcctgccagatctggcgcgtgctgtcctggagtttttccgcgcccgccaccacgtagcgtacgcggaagaaatcatacgggttggcgaagcgcgcgtagttaccgaggaaggtggacgtcccgaacagcaccgtgcagttacggtcataaaccagttccggcacaatgcggtagtgcagcgggcttgggtagaggaacacctcagcaccggtcagcagcggcgtaaagagacccacggtcagaccaaatgagtggaacagcggcagcgctgacataaagcgatcgttggcggtaaagtcagcaatggttttaatctgttcgacgttcgccagaatgcttttgtggctgtgaaccacacctttcgggttgccttcagagccggaggtaaagaggataatggcatcatcttccggctgctgcttaacctgcgccagacgcggcatcagcaggtgcgcgaaaatccacagcttgtcggcggtcgtgacgtctgctttcagatcttccaggaacacccagcgcacctgcgtcagctgttccggcaggtgccacagcttgcctttatccaggaactggcgggaggtaaagatggtgttgatttgtgctgcggtaatcgcgctggagagccctttcacgcccgccgtgtagttcatcatcgccggaatgcggccccgggagacggcaccaaagattaccgccgcgctgatacccgcgtttggcagcatcaggccgatcttttcgccctgtttactgtacttttccaggatacgcccgacaaacagcgttttggtcaacagcttacggtaggtatccggcgtaaaactgatgtcttcgatgcagtttttcttcgcaccgtagcgatactgcgccgacagcaacgattcatacagcgtttcgcgcgggcgaacggccatgcgcgcttccatcataatctggtgcagcatttccccggcgattttacggcggtcacgcgcgcgcggcgcctcgggcatcggcagtgacgtcggcggtaatatatgcagggtaattttcgggaacagacgctgcttcaccagccctttcagacggctgaaaaaggttagctcagccccgtcgatgcgtagcggcacgacggtggcctgagacttcgccgcgacaaaaccagccccgtcgtaaattttcatcagggagcccgtcactgaaatacgcccttccgggaagataaccaccgggcgcccctgcccaaccagacgcaccagatgtttaatcatcatcggtttggttgggtcgagcgggacaaaatcaatcagcggtttgagccagcgcatgtaccatttttcactgatggagctgtaaaccgcgaagacgggccgcacgggcaaaaacagcgccagcaatacgccatcaagaaaagagacgtgattcggtgtgataagcacacgctcgccatagagtgcctgcgtatcgccagtcacgcggatgcgaaacaggacacgaaacagtgtgcggaagaacccaaaaagcatttcaactccctttgccagccagtgtgaaaggtataaatggtggcagattacacgagaagtagtgagggagcgatagcaaaaacagaggcgaaaaaaaacctgcgcatccgcgcaggttggtgcaagagaagagtacgaaaacgtaccaggaattctcaccaatcaatacctctgggatcttgattgtggcctccggcgacaggcttcgccagcgggaaaacgcaagggaatgagccgaagtgcaaccaggtgtgaatattctcttttgctgttacaggttgaacttacaggcaaaaaaaaacctgcgtaaaacgcaggttggtgtaaatcgtgttaatcaaccgaagttgattccacctatcaatacctctgggatctcgactctagcaattcacaacgcatcgttgctaacggacaatcgcaacagcctgaggcaaagtgtaactaaaggttcagattgacattattcagacatgactgcccgtgtaacgattacaccgcgagggatgttctgcttcacgtttgcagaggacgctcacccgctccccttgaatgcgcgctgcttttccgcaacactagttagtgtgtaaacgcttacccctataagaaggtattgaatggcgacaattaaggatgtggctcgtctggccggtgtttccgtcgcgaccgtctcccgcgtgatcaacaactcccctaaagcgagtgatgcatcgcgccaggccgtgcaggacgccatggaaaacctgaattatcaccctaacgccaacgcgcgcgcccttgcccagcagtcgacagaaaccatcgggctggtggtcggagatgtatccgatccgtttttcggtgcgatggtcaaagccgtagaacaagtctcttatcacaccggaaatttcctgctgattggtaatggctaccacaatgaacagaaagagcgccaggcaattgagcagctgatccgtcatcgctgtgcggcgctggtggtccatgcaaaaatgatccccgacgccgagctgatccatctgatgaaacagatgccggggatggtgattatcaaccgtattattcccggttttgaaacccgctgcgtggcgctcgacgaccgttacggcgcatggctcgcaacccgtcatctgatccagcagggccatacccgaattggttatctgtgctccaaccacctaatttccgatgcggaagatcgccttcagggctattacgacgcgctgcgcgaagccggtctgccgtgcaacgatcgtcttgtggcgtacggagaaccggatgagagtggcggcgagcaggcgatgacggagctgctgggccgcgggcggaatttcaccgccgtggccagctataacgactccatggccgccggcgcaatgggcgtgctgaatgataacgggattgacgtcccggcagaaatttcgctgattggctttgatgatgtgctggtgtcgcgctacgtgcgccctcgcctgaccaccgtgcgctacccgattgtgaccatggcaacgcaggcggcagaactggcgttagcgctggccgagcatcgcccgccaccggaaattacccacctgttcagcccaaccttagtgcgccgtcactcggtggtatcgcccgcggaagccgtgagcgaacagcgatagagatggacggttttatccgggtattccagcgcatcgccaatgtagtgccagccgtaacgttcgtagaagtcgcggcaggcagaccagagatgaagctcgtgatacccggcgcgtcgcgcgtagccgataacatgctgctgaagttttcccgccagcccgtttccccgggcggcttcatcgacatacagcgcagccagccaggggtagagatcctgccgggaaattaaatcgcaacgccacaacccaacggtgcccagcagctggtcatcctcaacggcaataaaggtgagcggtaactcgcccggcgtcaggctgtgctcaacaatgctctggaaaaaggcacgcggcataccttcaccaaacgcgttccagatccagtcgatcacccgctgtgtaaactgcggcgcagcgtgaagcggcagtatattcacaccagtttcccctggaaaagggggaccgattcaaagagatagccgtcaaaatcgggcgcgtcttcgtctgacagctcaagcaggctctttttgacgttttcaagatgctggaacatcgcctgccacgcccccatcacgtcgcggcggcggagcgcagcgagaatggtttgcctgtcgccgagccatttcagccgccatgcgcggctggcgatgtggccgttgaattgctgccacagcgggctgctgtccatgtgatgccagacgctttcaacggtcgccagcagcatctggttttgtgtggcccccgccagcaccaggtggaacattttgttgttgtcctggctgcgatcgtcggcggcaattgcccgttgctcctgctcgatgatgcggcgcaggttgtcaatatccgcccgcgtcgccatttttgcggcaaaggcggcaatgttgctttcaagcagctggcgcgcctgaagaatttcaaacggacccacgtcactgttcagaaaacgttcttcctcgttttcatgctcctccggaatgcgcatcacgtacacgccagacccctggcgaatatccaccgtcccctgtagctcaagcatcagcagcgcctcgcgcacgatagtgcggctcacgccatacgtctcggcgatgttgcgctccggcggcagacgcgatcccacgggataatgcccctggataatctgcgcccgtaaatcctcgccaatctcctggtactgttttttttccggcaggatgacagccttatccacgttttcacctgtgtttttcagttaatgcgcgggccggacgtcctcccggccagtttgtgcgctattttaccagaaggcttacttccattcatcgtcaaccctgagcgtcagcacacgctcatcgcgcagctggcgaaaccaggatgccgatttctttgcccgccgtgcgcgatggttttcaaggtcgatctcaataagcccgtagcggtttttaaacgcgttcatcggggagacgttgtcggtgaaggcccacagcatatagccgtggcagttagcccccgcctcccgcgccagcagcgtgtaataaagatgttcgctgagaaacgcaatgcggtacgcgtcatcgataatgccgtcgcgattgcgaaactgcgcttcgttctccacgcccatcccgctttccgctacaaaccagtcaatgttgcgatactcgtttttaatccgcatcgccatgtcgtaaataatgcgcgggaagatctcccagccgcgggaggtgttcatcctccgccccggcagctcgaacggctcgtagtagtacgccgggtggaacggcgtctccgggtgccaggcgcgggacggggctttgacgcgatgcgggtaatagaggttaatgcccagctcgtcgacggtgttgtcggcaatcagcgccagctcgtcagccgtgtattcccactgcacctgatgctgcgccagcagggtaaaaagcgcctgcggatagcgcccgtgcaccagcgggtcaagaaagacgcggttatagaacagatcgtacatctctgccgcccgcacgtcatgcggcgcgcgcgagcgcgggtaggtcacctccgggttgagaatacaacccaccgtgccgtcataccctttctcgcgaaacagcttcaccactttcgccgtcgccagcaccttatggtggttccactgcatccaggtgctggtgttctgctcatagggccagcgcagtgcgtcaaggtagacgcgcgtctggaccacaatcggctcgttgaacgtaaaccagcgggtgactttgccgtgaaagcgctcaaacaccttttccgcataacgaacgaacagctcgacgacgtgcttcgacgcccagccgccgtaggtctccagcagcacgcccggcaattcgtagtgttccaggcagatcatcggctcaatgccctgacggtgcatttcatcgaacagcgcgtcgtaataggcggcgtactcttcatctacggtggcgttttcatagtcggtcaaaaagcgcgaccagttgatcgaggtgcgatagtgcgtcagtcccgcctgcttcatcagcgccacgtcttcgcgaaagcgattgataaagtcggttgccaccgccgggccgtagccgttgtgccagacgtgacgatcgttcttgtaccagagatcgatccacgaatcctgccccggctttttgccgctccagccctcggtctgccaggccgatgccgccgcgcccagcataaaatctggcggtatggttatctgttttatgctcatcctgccctcatgcgttatcggtggcttgttgcagtgcggcctgatctgcgcggcgtgaggcaattttcacaaacggcagatagataatcaccgcggtcacgatgcagataaactgggtgatcaccgcccccatggagcccgcggttgacagccaggcgttgatcagcggcggcgtggtccagggcaccatcaccacggctttcccggcaaatccggtcacggtggcaaagtagccaatcgagcccgtcaccagcggcgtgatgatgaacgggatagccaggatcgggttgagcatgactggcatcccgaagatcaccggctcgttgatgttaaaaatacccgggccgatggagagcttagcgatctccttcatctctttacgtttggtggcaatcatgacggctatcagcaggccgatggtcaggccggagccgccgatgctcatatagacgtcccagaacggcatggtgatgatgtttggcacctctttgccctgctcgaacgcgctcatgttaacggtgattgcccccagcagcagcggctcgcggatcggcttgatcatctggttgccgtgaataccaatcacccagaacagctgggcgacaaacatcagcagcaggatccccggcaggctttgcaccacgcgctccagcggctgttgcaccacctggtaaaccgcgtcgtagagatacattccggtaacctgatgaaacacgaagccaaaggtggcgatggcggtggtggtgataatggccgggatcagcgcagagaacgacgcggcgacgtttggcggcaccgtgtctggcatcctgattttcagtcccttgcggttttccagccagcagtaaatctccactgacaggatggcgataaacatgccgaggaacaggctgcgggtatccgagaactggcgcagcagcacgtctttcaccacgtgcatctcgccgtccaccagcatttccaccgtggtcggcgtcacgcagataaagcagatcaccgccagcaggccggggaacagggacttaatgccgttaatacgccccagctcaatgccgattaaaaacaccgcgccgatgttgagaaagttgagcgtggcatagttgagcgcgctggtgatcggctttaacgccgccagaaacgacagcgactgaaagctcgccaggccgtttttcggatccagcaccatattggagatcaataccgagaacgcccccacaatgatgaccggcattaaggtaataaacgcagacttaatcgcctggatatagcgatagctgttgaaggtggtggcaaaactgcccagagcgtcgatcagtttttcctgaaatgccatagggtaatacctcagtaaaagggcttttattgaataagatggacagccggatactattggtatgccaaaaatagcgtccacaggcgctttgttctgtgattaagctctcaatgaggtaagaggtattccagattgcgatttatcaccattttggcatgccaatgacaggcatttatcccgcgggcgaggatcgttaccgaaaagcgtgatcgttatggggttttgcccttcccacgtcgcttatgcgccggatggtctgtgttaaactgcaaaccattacgtggaaacaggaatttcgaatggcaacaatgctggatgtctcactgcgtgcgggcgtgtcgaaggccaccgtttcgcgcgtgctgaacggcacaggtcaggttaaagagagcacgcgtcagcaggtatttcgcgcgatggaggagctgggctatcgtccgaactttctcgcgcgttcgctggctaaccagaccagcaacagcattggtctggtcgtctcgacgttcgacggtttttactttggtcgtttgctacagcaggcgtcacggcagaccgaaaagcacggaaaacagctgattgttaccgacggtcacgacgcccctgaacaggaagaacaggcggtgcagatgctcgccgaccgcaagtgcgacgccatcgtgctgtatacgcgttacatgagcgaaaagacgatcctgaagctgatcaacagcgtgcagacgccgctggtgatcattaaccgtgaagtgagccaggcggcggatcgctgcgtcttctttgaacagcaggacgcggccttcaaagcggtggattacctgataagccagggccaccgggagatcgcctgtatcaccgtcccgatccacacgccaacgggtaaagcgcgactgatgggctaccgtaaggcgctggagaagcacggtattcgtctcgacgagcggcggattaaatacggcgatgcaggcatgacgcggggttacgagctgtgcaaggagctgattgcggaaaagacatcgttcagcgccctgtttgcctgtaacgatgatatggccctgggtgcctccaaagcattacaccaggccgggctgaagatcccgcaggatatttcgctgtttggttttgacgatgcccccagcgcaaagtggctggagcctgccctgtcgtcggtgtatctgccgatcgacaacatgatcatcacggcgatcgatcaggcgatccggctggcaaaaaaccagccggttgaagcgatcccgccgttcaccggcaccctggtgttacgcgattcggtgacaacagggccctggtttaatcagaccagctctaacgccagcagctcctgaatggtctggcgacggcgaatcagccgcgccacgccgttatcaaacagcacttccggcagcagcgggcggctattgtagttggacgacatagacgccccgtacgcaccggtatcatgcagcaccagataatctcccggttttacctctggcagcgaacgggtttcgactttcccgccttcctgctgagtaaagacgtcaccggattcacacagcgggccggcaacaacggtctcgatgcgcggggcgttaaccagatcgcggccatcggcggcaagtgcggtgatgtgatgatagctgccgtacatggacgggcgcatcagatcgttgaagcctgcatcaatcagcacaaagtgacggcttcccatctccttcacgctccgcacctgcgccaccagcacgccggcctcggcaaccaggaaacgacccggctcaatctccagcttcaccgcatggcccagatgggcggcgatgctgtcacgcgcggcgctccacaggccgtaatagtgatccgtgtcgatcgcctcttccccttcgcggtaaggaatcgaaagccctcccccggcggagatcgcctccagatcctgaccaaaatcgataacctgacgcaccatggcgccacagacctgctcaagatggccgtaatccacgccggacccgatatgcatgtgaatgcccaccagcttgaggttgtagcgttgtaaaacctccagcgccgcaggcatatcggcataccagatcccgtgcttgctgttttcgcccccggtgttggttttctgactgtgaccgtgcccaaagcccgggttgatgcgcagccagacgcgatggccaggagagacctgcccaagctgttccagcatatccaccgaaccggcattgaccgggatttgcagctcatgcacgcgcgccagcgtggcgtcgtctatcaggtcagcggtgaagacgatcgcgtcgctgtcggctttcggatcaaacccggccgccagtgcacgttcgatctcacccagcgatacggagtcaaccttcacgccctgctcgcgcatcaggcgcagaatatgaatattggagcaggccttctgcgcaaaacgcaccacgtcaaactgatgcagcgcggcgatcttctcgcggacaatctgcgcatcgtagacccacaccgggcagccgaattcggcaggcaggcgcagcaggttatcggcgtttaaatcggtctcagtctggttgagtgggcgtggcatggtcatctccggaaatctgttttttatcattacgccatagcctgaagagaataaaaaatatcgttttatcttgagtctatgcaaaaatgatatggactacgctcagccatcaggtgccctatgcccgccgttaacctacgccatatcgagatttttcatgcggtaatgaccaccggcaatctcactgaagccgcgcacatgctgcacacttcgcagccgacggtcagccgcgagctggcgcgttttgagaaagtgctggggctgaagctgtttgaacgcacccgcggcaggctgcatccaacggtgcagggtttacgtctgtttgaggaggttcagcgctcctggtacgggctggacaggatcgtgagcgcggcagagagcctgagggagttccgccagggcgagctgtccatcgtctgcctgccggtcttttcccagtcattcctgccggtactgttacagccgtttctggcccgctatccggaggtcagcctgaccatcgtgccgcaggagtcgccgctgctggaggagtggctttcggcccagcgccacgatctgggtctgaccgaaaccctcgtcacgccagcgggaacggaacgcacggagctgatgtccctggatgaggtctgcgtgctgcctgcctgccatccgcttgcccacaaagcggagctgaccccggcggattttcacggtgagaactatatcagcctgtcgcagaccgacagctaccggcagcttctggatggcctgtttgccgaacatcaggtgaagcggcggatggtgatggaaacgcacagtgcggcgtctatttgcgcgatggtgcgcgcgggcgtgggtatttcggtggtgaacccgctcacggccatggactacgccagcagcggcgtggttctgcgccgttttagcgtttccgttccctttaccgtgagcctgatccgcccgctgcaccggcccgcctcagcgctggttgatgcctttagtgaacacctgattgcgcacgcgcgtcaggtggcgcttcgcttacctgacctgcaaaaaccactatgacagcatgaactccaccgcatccgcggcatggatggcggcggtatcgaagaccgttatcgggctttggtctgccggcaccagcaggccaatttcggtacagccgaagataaccccttccgccccctgctgcgccagtttctcaatcacgctgacgtaccatgcgcgcgacgtttcgctgaaggtgcccagacacagctcatcaaaaataatctggttaatgcgcgcccggtcagcctcttcagggatcaggctttcaatcccgaactggctgttcagccgcccgcggtaaaaatcctgctccatggtgtagcgcgtccccagcagcgccacgcgcgtcatgccggcggcacgtatggcacgcccggtggcatccgcgatatgtaagaacggcagcgaacagcggtcttcaatgtgcgacgccaccttatgcatggtattggtacacagcagaataccctgcgcgcccgcacgctccagcccaagcgcggcgtccgccagcatctgccccgctttgtcccactccccgctcgactggcaggcttctatttcatggaaatccacgctgtgcagcagcaggctggccgaatgcagaccgcccagacgctgtttgacgccttcattaatcaggcggtagtacgggattgttgattcccagctcatgccccctaacagaccgatcgttttcatctttcctcctgtgcgtttcacccagtgaagcaaacttgtgatcgcctttccagttatttggctaaacgtttccttttcgctgcgggtgcgataagttaaatgaaacaatgtttcattacataacagggagaaaatatgtttattttccataaagagaccacgcttgaggatctgggcaacggcgtgacgcgtcgtattctggcgcacgacggcaggatgatggcggtggaagtgaatttcgagcaaggtgcgattggcccgatgcataaccatccgcatgagcagctcacctacgttctctcgggggaatttgagttcaccattggcgaggagaagcatgtggtgatggcgggcgacaccctctataaagcgccgcacgtgatgcacggctgcgtttgcctgaaacccggcaccctgctggatacctttacgccggttcgcgaagatttcctgaaataaaaaaaggcgctcagttgagcgccttttttgaagttattccgtaaccggctcaggaagttgttccggcagcgggttgcgggtgctcatagcctcgcgcagcagcacgctgccacaggcgaacagaccacccagaatacacgccagcagcacgatcagggctttgcccgggccatcttttttcaccggcatagaaggtgaaagctggtatttgaacggctccaggctcacatcttcgaaggaaagtttttgcagctgtgccagatagtattcgcggttctggaaatcggcgttcagctcagaaacgtcctttagatttttttcaatctgcaatttctgcgcaatcccgtccgcaccgagggcgacggaataatccggatcgtctttcaccgcctgtccattgctgtagaccggctttttgatccctgccgcgttcgccacttccagcgagtagttcaggcgttgcaggttggtattatggatatttgtcagacggacccgatccagctccagctgctgctgaaccgttttggttctcaggatcagctgatcgcgaatgttttgcatggtctcctgctcgacgatgcgggagatgtactgaatgtaaccattcaacactttctgcgcgtcctctgccgttggggcagtgaagcttaacgtccaggagaggtacggtgctttatcggcatttttttcctgcgtgttatcaacggctttcatcttttcggcaatattgaccaccgcgcggtgcagctccagcgggtcaacctgagcgccatcgagctgagccatcacgtaaggtgagctcttcatgtactcttcaagcagagactgggactgaaactttttaacaaacagattaaacacatccgcacgggtaattttcacgtcgacatcaagcacctggagcgccaccatcatctggcgtagcgaactccactgcgtctgttccgcgggcgtaatgaccgctttactggtccatttttgcggtatcagaaaggcgattgccaggccgaccagtgcaaatgcaaagacaatggtgatgatgcgtttttttgctgccagcaggacgtccagcagacccagaagatctatttctttagcgctgaccgccgggggagcatagtgaggaaagttgagatccgtatgttttttgaaatccatcgctgacataactgttcttcttttaaggatgcagtgaaattctgcctgactggttccggtgtaacaaatcatacaagaatgtaagaattatctgaatgacgaattggtacatctgtagacctgctatcagatctggtagttagccacgctgcgtgactattcttattcccgctccctttttgcttcgttatctcttcctcatggccggcggcaaagcttcgtgaaaagtcaaaaatgccacctccctcactatattgaaacagcgtttcgacactgatcacatttccaccattaagcgaatgacgcagaaataaatcgcaataatataaaataaaacgatgttttagtatccaagaacaccggttcagctcttttgaaaccagaagcgcttacagcacaaagaaagacaaaaaagcgttaaaaaacaaacgtagatttcgccttttccagacgttgcaccctgaatttcagctctcatgccgcgcatcgcaggcctgggaaaatgtaacaaagcagatttcgtattaaaccattgattgccaggtaggtatgtatgaatgaaaacaagctgctggggctcgcatggatatcaccctacatcatcgggctgatactctttacggcattccccttcgtctcatcgtttttcctcagctttacggattacgatttgatgagtccgccggtgtttaacggcattgaaaactatcgctacatgtttaccgaagacacgctcttctggaaatccatgggcgtgacctttgcttatgtatttttaaccatcccgttaaagctcgcctttgcattaggcattgcctttgtcctgaactttaaattacgcggcatcggctttttccgaacggcttactatattccgtcgatcctcggcagttccgtcgccattgccgtattgtggcgcgccttatttgccattgatggtctgctgaacagctttatcggtgtatttggctttgatccggtgaactggctgggcgagccgtcgctggcgctgatgtccgttaccctgctacgtgtctggcagttcggttccgcgatggtcatcttcctggccgcgctgcaaaacgttccgcagtcccagtatgaagcggcaatgatcgatggcgcatcgaaatggcagatgttcatgaaggtgaccgtgccgctgattacgccggtgatcttcttcaacttcatcatgcagaccacgcaggcgttccaggaatttaccgggccgtacgtcattaccggcggcgggccaacctattcgacctatctgttctcgctctacatctacgacaccgcgttcaagtatttcgatatgggctatggcgcggcgctggcgtggatcctgttcctggtggtggccgtcttcgccggtatcgcctttaagtcgtcgaaatactgggtgttctactccgccgataaaggaggcaaaaatggctgatattcaacaactctccacggcaagaagcgtcgccgaacgcgaagtggcccgcacgctgcgcagagagaaaatcaacgcctccgttcgctatgtgatcctgctggttgtcggcctgctgatgctttacccgctggtgtggatgttctccgcgtcgttcaaaccgaaccacgagatcttcaccacactgagcctgtggccagcccacgccacctgggatggtttcgtgaacggctggaaaaccgggaccgagtacaacttcggccattacatgctgaatacctttaagtatgtgatcccgaaagtgatcctgaccattatctcctccaccatcgtggcgtacggctttgcccgcttcgagatcccgtggaagaagttctggttcgccacgctcatcaccaccatgctgctgcccagcaccgtgctgctgatcccgcagtacctgatgttccgtgaaatgggcatgctcaacagctatatgccgctgtacctgccgctggccttcgccactcaggggttcttcgtcttcatgctgatccagttcctgcgcggcgtcccgcgtgacatggaagaggcggcgcagatcgacggctgtaactccattcaggtgctgtggtacgtggtggtgccgatcctgaaaccggccattatctccgtcgccctgttccagttcatgtggtccatgaacgactttatcgggccgctgatttacgtctacagcgtggataaataccccatcgcactggcgctgaaaatgtccatcgacgtcaccgaaggcgcgccgtggaacgaaattctggcaatggcgagcatctccattctgccatccatcattgtcttcttcctggcacagcgctacttcgtacagggcgtcaccagcagcggaattaaaggttaagagggaaataccatggctgaagttattttcaacaagctggaaaaggtctactccaacggctttaaagcggtacacgctatcgatcttaaaattgctgaaggggaattcatggtgatcgtcggcccatccggctgcgccaaatccacgaccctgcgcatgctggcggggctggaaaccatcagcggcggcgaggtgcgcatcggcgacaagatcgtgaacaacctcgcgccgaaagagcgcggtattgcaatggtgttccagaactacgccctctatccgcacatgacggtgcgcgagaatctggcctttggtctcaagctgagcaaactgccgaaagatcagattgagtctcaggtgaatgaagccgccaaaattcttgagctggaagagctgctcgaccgcctgccgcgccagctttccggcggccaggcgcagcgcgtggcggtaggccgtgcgattgtgaaaagccggatgtgttcctgttcgatgagccgctttcaaacctcgacgccaaactgcgcgcttcgatgcgtatccgtatttctgacctgcacaagcagttgaagaagtcaggaaaaccggcgaccaccgtttacgtgacccacgaccagaccgaagcgatgaccatgggcgaccgcatctgcgtgatgaagctcggccatatcatgcaggtggacacgccggacaacctctaccacaagccgaagaacatgttcgtggcgggctttatcggcgcgccggagatgaatatacgcaaaagcgtgctggtcgaaaaagcgggccagctgcacatcgccattggcgatgaaaccatgccgctgaacgcggagaagcaggagaaagtcgcggcttacgcgggtcaggagatcttctacggcgtgcgcccggaatttgtgtcgctctctgatgagcccttcccgaatggcggctgtagcggggagatggtgcgcgtggagaacatgggccacgaattctttgtgtacctgaaggtcgcggactacgaactgaccgcccgaatcccgtccgatgaggctaagccaatgattgataaggggcttcatcgtaaggtgtatttcacgtttgagatgaacaagtgtcatatttttgacgcaaaaactgaacagaacctctctctctgatggagtgataaaaatgaaaaaagtgcttttaagcgcagcaatctccgcgaccctcggccttaccgctttgccatcgatggcgcagaatgtggatttacggatgtcctggtggggcggcaacggtcgtcaccaggtcaccctgaaagcgctggaagagttccataagcagaacccggacatcaacgtgaaagcggaatacaccggctgggacggtcacctttcacgtctgaccacccagattgcgggcggcaccgagccggacgtaatgcagacgaactggaactggctgccgatcttctccaaaaccggtgatggcttctacgatctgaacaagatgaaggacgtgatcgacctgtcgcagttcgatcccaaagagctacaaaccaccaccgtgaacggcaagctgaacggcattccgatctcggtgacggcgcgcgtgttctacttcaatgacgaaacctggaaaaaagcgggtattgcgtacccgaaaacctgggacgagctgatggcggccggtaaaaccttcgagagcaagctcggcaagcaatactatccggtgatcctggagcaccaggatacgctggcgctgctgaattcgtacatgatccagaagtacaacattcctgcggtggatgagaaaaccaaaaagttcagctacacaaaggaacagtgggtggagtttttccagacctacaaaaagctgatcgacagccacgtcatgccggacaccaaatactatgcctcgttcggtaagagcaacatgtatgagatgaagccgtggatccagggtgaatggggcggcacctacatgtggaactccaccatcaacaaatattccgacaacctgaagccaccggcgaaactggagctgggcagctacccaatgctgccgggagccaccgacgcgggtctgttcttcaaaccggcgcagatgctgtcgattggtaagacaaccaaaaacccggaagcggcagcgaagctgattaacttcctgctcaacagcaaagaaggggtcgatacgctgggtcttgagcgcggcgtgccgttgagcaaagtggcggtgcagtatctgaccgaagacggcaccattaaagaggacgatccatccgtggcgggcctgcgcctggcgcagtcgctgccggcgaaactcaccgtctcgccatactttgacgacccacagattgtggcgcagttcggtacctctttgcagtatatcgactacggccagaaaaccgtggaagagacggccgatgacttccagcgtcaggcggagcgtattttgagacgtgcgatgcggtaaacacaaagccgggtggcgcttcgcttacccggcctacaggctatcgtaggcccggtaagcgaagcgccaccgggcaatgacattacacgccgatattacgtagtttctcccctctcatcagcttgcgttcaatatgctccagggtcacgcctttggtttccggaatcagccagaaggtcacgccgataaacgccacgttcagcaccgtatagagccagaaggtgcctgccgcgccaatcgcatccagcagcgtcaggaaggtcgcgccaatgatcatgttcgacacccagttggtggtggtggaacaggtgataccaaagtcacggcatttcagcggctgaatttcagagcacaggatccacaccaccggcgcggcgctcatcgcgtaaccggcgatgcacatcatggtcatgccgacggagagccaggagaggccgcttgacgccgtgccgttatcgaactgcatcaggcagtagccgagtattaaggtgccgagcgccatcacgctaaagccaattttcagggccggtttacgtccggccttatcaacggtgaacaccgcgataaaggtggcgaacataaaggtcagccctaccaccagcgtggcgatcatctgctgttcggtggtggtaaaaccggccattttaaagatgcgtggggcgtaatacatgatgatgttcatccccgtgaactgctgcatcgcctgtaacagcatgccgaggaacaccgcgcggcgcacgttgcggtttgccttaaacagcgaccagccgccctgcttcagcttcaggctctcgcggatttcgttcagctcttcacgcgctttttcagacgtgtcgcgcagcatgcgcagcacctcttccgcctccacgtgacgccctttttgcgccagccagcgcgggctgttcggcaggaaaatgactaacacaatcagcagcaccgcaggcagcgccagcacgccaagcattgcccgccagttgccgctgtagctgaagtatgtatccgacaggaacgccagcacgataccgagcgtcaccatcagctggtacatgctgatcatcttcccgcgcacgttttcgctcgccatttcggagaggtaaagcggcgcggtgtaggacgcgatacccaccgccacgcccagcagcacgcgggagagcagcagcacctcaacgttgatggcaaacgccgagccaatggaaccggcaacaaacaggatcgccccaaccatcaggctgtatttgcgcccgagacggaacgacagccagccattaaacagtgcgccgatggccgcacccagcatcatgctgcttaccacccactcttgcaggcggttgcttaacgtaaagtggtcggtaataaagggcagtgcgccagcgataacgccgatatccagaccaaacagtaaaccggctacggcggccgcaacagaaacaaactggttcatgcgtcgggtatcgcgcagcgcagcgggcataagggtagagtcatttacagatgtcatagtttcctgcctcaacagcgaaattcgttaagtgaaattacgagataccggaagaaagtgtcaggccggaactggtgaagatatggattatttcgctacgacataccgatctgtgatggacattacaatttcaaatcagggtggtttaaccttattttttattaattagttaatatttaagcaataaatgtgtgatacctgtcattcattccttttcagtatggatttttcatctttaaggatatggataaagccaattttggcgcaaaaaaacctccacccgagggcagaggttctttattctggctgaattatcgtgccagccagccgccgtcaacggcaacggtgtagccgttaatataatccgaagccggggacgccaggaacacaaccgggcccatcagatcgctcggcagaccccagcgacccgctggaatacgctccaggattgccgcgctgcgctcttcatccgcacgcagctgctgggtattgttggtggccatgtagcccggcgcaatcgcgttgacgttgatgttgtgctgcgcccactcgttcgccagcagacgggtcacgcccatcacggcactcttcgatgcggtgtaagacggcacgcggatgccgccctggaaagagagcatggaggcaatattgatgatcttgccccctttcccctgggcgatgaagtgcttcgcagccgcctgggacataaagaacacgctcttgatgttcagattcatcacgtcgtcccagtccgtttcgctgaagttaatcgcgtcttcacgacggatcaggccggcgttgttgaccagaatatcgatatgcccaaactccgccaccgcgcgatccagcagctcagggatcgcatcgattttgcgcaggtccgcggtcaggctcaggaaacggcggcccagcgcggtgacgcgctcgatggtttccgttggctcaacgatgttaatcccgacgatatcgcagcccgcttcagccagacctaacgccataccctgcccaagcccggtgtcacaaccggaaaccacagccactttannnnnnnnnnnnnnnnnnnnnnnnnnnnnnnnnnnnnnnnnnnnnnnnnnnnnnnnnnnnnnnnnnnnnnnnnnnnnnnnnnnnnnnnnnnnnnnnnnnnnnnnnnnnnnnnnnnnnnnnnnnnnnnnnnnnnnnnnnnnnnnnnnnnnnnnnnnnnnnnnnnnnnnnnnnnnnnnnnnnnnnnnnnnnnnnnnnnnnnnnnnnnnnnnnnnnnnnnnnnnnnnnnnnnnnnnnnnnnnnnnnnnnnnnnnnnnnnnnnnnnnnnnnnnnnnnnnnnnnnnnnnnnnnnnnnnnnnnnnnnnnnnnnnnnnnnnnnnnnnnnnnnnnnnnnnnnnnnnnnnnnnnnnnnnnnnnnnnnnnnnnnnnnnnnnnnnnnnnnnnnnnnnnnnnnnnnnnnnnnnnnnnnnagaatcatgtttattccttaatcgttcagcgcctgtcagcaacaggcagatatatacttaactgcctgcgactagcgcagatccttaacagcgacgtggtccatgtcatcgaagacctggttttcaccgaccataccccagataaaggtataggctttcgttcccacgccagagtggatggaccagctcggcgaaatgaccgcctgctcgttgtgcataacgatatggcgcgtctcctgcggctgtcccatcatgtggaacacgcaggcgtcttcatccatgttgaaatagaagtagacctccatgcggcgctcgtgggtatggcacggcatggtgttccacaggttgcccggcgcaagttcggtcagccccatgctgagctgacaggtttccagcacatccggaacaaagtatttgttgatggtgcgacggttgctggtgaggttatcgccaagggtcaccggggcaacatccgctggcgtgacttttttggtggggtaagtcgtatgagccggggcgcagttgtagtaaaacttcgccggtttgctgccatcaatgctggcgaacaccacttctttcgcccctttgccgacgtacagcgcgtcgcggtgaccaatttcgtagcactggccatcaacggtaatggtgcccggcccgccgatgttaatcacgcccagttcacggcgttcgaggaagtagctcacgcccagctgtttgcccacttcaccgcccacggagacggttttcgccaccggcataatcccgcccacaataatgcggtcaatatggctgtagagcatggtgtacttgtcggcttcgaacacttgctcaactaaaaactcactgcgcagcccctgagtatccagcgttttagcgtgcgcactgtggatgctttgtctgacgtccacgtaaacctccagaattgatcgtgcccgaaggcaaagataattaacgaaacaacgttccgttttcgtgatgaacacatattatcccctgaccacggggttttcaattgaatttaaaacaacgtttcattttttctgcttgtttatgccagaaatggtgtttcgatcacgataaatctttaagaccctcaatctggttaatgaaactgagaaagtgcgctgtcagtcacacatagtgaaacaacgttttgataatttatcacctagttttcaacctacattacgcgttcaaaggagtgcattatggctaaaggtatgcgggtcaagctgagctatgaggtcagccgcgatccggatacaggcgtggaagtcacccgcctgaccccaccggaagtaacctgtcatcgcaactacttttaccagaagtgcttctttaacgatggcagccacctgctgttcgccggggagttcgacggtcactggaactattacctgttggatctgaaaaatgccgaagcggtacagttgaccgaaggcgcgggcgataacacctttggcgggtttctctctccggacgataaatccctctactatgtgaagaacgatcgcactctgctggaggtggatttacagacgctggcagagcgcgaagtgtaccgcgtcccggaagagtgggtcggctacggcacctgggtcgcgaacagcgactgcaccaaactggtgggtattgagattgccagacgtgactggacgccactcaacgactggaaaattttccacgacttcttccacaaagggccgcactgccgcctgctgcgcgttgatctgaaaacgggtgaaagcaccaccattcatgacgagaagatctggctgggacatccgatatatcgcccgttcgatgacaataccgtggccttctgtcatgaagggccgcacgacctggtcgacgcccgcatgtggctggtcaacgaagatggcagcaacgtgcggaaagtgaaaacgcacgcggaaggtgaaagctgtacacatgaattttgggtgccggacgggtccgcgctgatctacgtttcttacctgaaaggtcagcaagggcgcaccatctcccgcttcaacccggacaccggcgtgaatgaagcggtaatgaatatgcccgcctgttcgcacctgatgagcaacgtcgacggcaccctgctggttggcgacggctccggtacgcctgtcgatgtgaaagacaccggcggctacaccattgataacgatccttatctgtatgcctttgacgtggcgaagaaagcctgttaccgcatcgcccgtcatgacacctcatgggctacggtggcgaacagccgccaggtaacccacccgcatccgtccttcacgccggacgaaaaagcggtgctgtacagttccgataaagacggcaaaccggccctctatatcgcgaaactccctgagcaacctgaaatgttgcatgcctgacttgagttagtgtttctgtaactggccttgccctccgattcggagggcttttttttgggtgattgcgcggcgctttttgccgggtggcgcttcgcttacccggcctacgaaacgacggattggaaggaaggtgtaggtcggataataaggtgtaggccgggtaagcgttagcgccacccggcggttttagcgaagaagataaattatcagaaggagtacgccacgcctaaacggaaacgggtctggcgttcgtccgtgtctttaacccccacgttgcccacctccacatacggcgcccagtttttatcccatttgtaggccagcttggcgttatattcgttggaataatctttattgttatttcgggccacgccttcagaacttttcgcgtaaacatagttcagctcggtacgccagtcacctaatacccaaccgacccacgcatcgccacggttaactttatcatcgtccttatttgagcttgacgggtagcgggtatattcgtaacggtaacgcgcagccacgtagaagccattatcgaagctatattgcacatgcagattcggtttataaatggtgcgactgtctgtgctttcaatcgtaaacgcaggggtcagggcgatattgtctgtcgctttccagcgccagctaatctgatcttcgtgaccgttccccactacatccgcgaatggctgatctgccttgtccccgcctgatttccacttcgcctcgactgaaaaaccaaagccattatcaaagcggtgcgagacggcaacacggtcggcattcgagccgctgtcaatatattcgtgacgcagatcgacggtaacggcgctagccgcaaaagaggcactaataagggaagcaaggagcagagatttcttaaacatgaaaaaaccctcaattaaaataacgtttcgtttttatgaaacttgagtttattttttatgcaccgttattttagtgacaaggatcgaaattatttgtttcattttttttggcaaagattgacgtgaaccccatcaacaaaaaaagggtattaaccgtaaatttcaggcgtgagatcacattaagcacttcacaaagccaataattaaccgcgcaataattattgcgggcttcagaaagaacgcataagtgttaaaaaaggattctgcggacacaaaaaaacctcccgtgggaggttttctgtgcgcagagggagaaattaccgttcgatagccagggccaccccctgccccccgccaatacagagcgttgcgatcccttttcgggcgttacgctttttcatttcgtggaccagcgacaccagaatgcggcagccggaggcgccaatgggatggcccagcgcgatggctccgccgttgacgttgacccgcagcggatcccattccagcattttcccgaccgagatcgcctgtgcagcaaaagcttcgttgacctcaatcagatccacatcgttcaactcccagcccgcccgctccaggcagcggcgcgtggcatagaccggggcgatccccattaacgcgggatcaacgcccacgctggcaaacgctttaatccgcgccagcaccggcagcgccagctcctgggctttgctttcactcatcatcatcaccgccgccgcaccgtcgttaatggatgaggcgttgcctgccgttacggaaccgagcgtttcaaaggccggatcgagttttgccagcccttctgcgctggcatcggtgcgcggctgctcgtcggtatcgacgatgagcgcttcgccgttctggcgctgggtactgaccgggacaatttcatcgcgaaaacgcccggagtcgatcgctgcacgcgctttttgctgtgagctgagggcatatgcatcctgaagctcgcggctgataccgtattcccgcgccaggttttccgccgttacgcccatatggtagtcgttgaaggcgtcccacagcccgtcgtgaaccaggctgtcaagcagctgactattcccgagctgcgcgccggtccggctgtcggtcaggacatgcggggcgcggctcatattctcctgcccgccagcaatgaccacgtccgcttcaccgcactggatggcctgcgtcgcaagatggagcgctttcaaacctgaaccacagacgtcgttgatggtaattgccgaaacggtattaggcaggccgcccttcagcgccgcctggcgcgcagggttttgtcccgcgccagcggtcagcacctggcccaggatcacctcatcaatttcatgtgcggcaatcccgctgcgttccaccagcgctcttaccaccacgctgccaagatcaaccgcagagtgacgcgcaagcgctccctgaaaacagccgatagccgtacgtaacgcacccactataacgacatctttcatcacgacctctgtgcaaaatgacatgacgatagtagaggattgttatcaacaattgacgcaaatgtttaaaattagtgagtttagtcacaggattatcgtgcgtcctgtaagtactggcgcagccagcttccggcgacgccgggcggggttcgtttgttccataccagatcgatggcaatcgacctcggccagcccggcacgttcagctgcaccagcgatttcgacgcggcaaattcgtcgaccagcgcgcagggtaacgcgcaccagccaaagccctgtaccgccatgctcagcagtaacaggtaattcggcgcagaccagaccggcccgcgcgaaaggggcgcttcccgttcaagataggtgctcagccgcagctcgcgccagccatgcagctcgtccgcctgcgtctcatgttgccctgccagaggatgtccggcagaaacgtagatggccatccgcgtctgcataggcagacgggtcgcgccaatatcggtcgggtagctgtcgcgcgcttccgtcaggccaatttgcgcccgctccttttgcagcagatcgatcacgtcctcctcttctccaatcaggcactcaaattccgtgtgcggaaaacgctggtcgaactggctcatcatctcttccagcacggccgggttaagcgtatcggagagaacaaaggtaaaacgcgcctccgtttgcgcggttaacgatacggccagctcatccaggcgcgcgctggcggcgagtatcgactggacatagcccagcacctgttcaccctgggcggttaataccgggtgacgcgccgagcgatcgaacagctcaaagccaaggtcagcttcaaggttggcgatggaggtgctgatggtggactggcttttacgcagccgccgtgccgcagcagaaaacgaacctgcggcgacagtttcaacaaacgcggtcagtgcttcgggagagtaacgcatgatgtatctactttatcgatggataccatcttttatatatcaccttaaacgataagaataggccgcatcaacgcccatactggcgtctatatgaggtaaatatgcaacatcaggatgcactccaacgtaaattgccggagcggatcttccatgccgtctgttttgaaggcattgctacggcgatcctcgccccgacggccgcgtggctaatgcagcgctcggtggttgaaatggggggtctcaccattattctggcgaccacggcaatgctctggaacattatctataactttggcttcgaccgtttctggcccgtccagcgggtgaagcgcacggcgaaagtgcgcgccctgcatgccctgggttttgaatgcggctttattgtgattggcgtaaccatcgttgccgccgtgctgggcgtgtcgctgctccaggcttttaccctggaaattggtttctttctgttcttcctgccgtacaccatgctctacaactgggcgtacgacaccctgcgggagaaaatcatcaagcgccgccagcaacgacgcgccctggcaagcgaataaccttccggccggagacctgctccggcccaccccctgcgaagcaacggcgacctcaacgcataattatggtaaattgcactcctttttgttcgttttatagttgatacgttgctctaatgtcgaaaatttggtcaaaagaagagactctctggagtttcgccctctacggcactgccgtgggcgcaggaaccctgttcttgcccattcagctcggctctgctggcgcgattgtcctgctgatcaccgcccttgtggcgtatcccttaacctactggccgcataaagcgctggcgcaatttattctgtcgtcgaagacgaaaggcaacgaagggatcaccggtgccgtttcgcattactacggcaaaaagatcggcaacctgatcaccacactctattttgtggccttctttgtggtagttctgatttacgcggtggcgataaccaactcactcactgaacagctggcgaaacggatgacggtggataccggcatgcggatgctggtgagctttggcgtagtgctgattttgaatctgatcttcctgatggggcggcacatcaccattaaggtgatgggtttccttgtctttccgctgatcgcctatttcctgtttgtctcgctgtatctgacgggcagctggcagccgtcgctgctgaccagccagatggccttcgaccagcatacgctgcaccaggtgtggatttcgatcccggtgatggttttcgcttttagccatactccgatcatctcgaccttcgccgtagaccgtcgcgagaaatacggtgaagaggcgatgggtaaatgcaaaaaaatcatgaaagtggcgtacctgatcatctgcctcagcgtgctgttctttgtgttcagctgcctgctttcgattccaccgtcgtatatcgtggcggcaaaagaggaaggggtgacgatcctgtccgcgctgtcgatgatgccatcgtccccggcatggctgggcatttccggcattatcgtggcgattattgcgatgtcgaaatcgttcctcggcacctattttggcgtgattgaaggggcaacggaaattgtgaaatcgtcgctgaatcaggtgggtgtgaagaaaagccgcgcctttaaccgcgcgatttcgattctcggcgtgtcgctgattacctttgcggtctgctgcatcaacccgaatgcgatctcaatgatttatgccatcagcggtccgcttatcgccatgatcctgttcatcatgccgacgctgtcgacgtacctgatcccgtcattaaaaccgtaccgctccatcggtaacctgctgacgctgattgtgggtgtgctgtgtgtgtcggtgatgtttgtgggttgagtatgctgcccggcgcaatgccgggcatctgttttacgcccgaatatcgtcatactcccgcgtattatcaaactcatgcttcgcaaatggacacagcgggataattttacgattctcaccgcgcatcttctctaccaccttcgccaccagctgtttacccacaccctgccctttcaggctcggatccacatcggtgtgctcaatgatgctcagatgctcgccggtcgggacaaagacgatctccgctacctgattgccttcggcgtcgttgacgtaaaacttgttatggccttcaagaatttccatggttcctcgcttatttttggcggtacttcagcgcaccgctcgggcaggtatcaattacgcgcataaccgtttctgcatctacttcatccggcgcgatccatggtttacgcttcagatcgaacagcttcgcgctgccgcgcacgcagttgcccgagtgtttgcagatcccggtgttgaagtagacatcgattttctcaccggtataggcccggtaccccgcatccagtagctcctgatccatgacattgcctctgtaattattgtggtgacaaaagaagcataccctcacccgatccgcctgaccacgtcaaaaacgaggtttagccacactcttttcagcgcatgacttcttcacgttcataggattattccgaatacaagaacacccgttgcgaagatatatttttgcgctgtgtcaattcttgtaataattcacgccacgttcacattaggattattagctaagcgcaatcttaacctccggatttattttcatctaactgatggatttcccatccgtttttaaaactcgtaacgaagcggtatttcttcactccctgcaaaattaccgcaaaacaacccagacaagaaatttgactcttctcacataacgactaatgttaatttctgaacgacaactgatacgaattacttatcgtatctcctggcataaacgcaacatgagggttgatatatggcagagcaacatcgtggtggttccggtaatttcgctgaagaccgtgaaaaggcatcagaagctggacgtaaaggcggccagcacagcggcggtaatttcaaaaacgatccgcaacgcgcatctgaagcgggtaagaaagggggacagagcagtcacggcggaggccgtaaatctgataactcctgatcttatttaaagctcttataaatataccgagagcatgctgcgggcccgtcggctcgcagtaccttccctttatttcactggagcgaaaatatgaatatgaaaactgttgaagatgtatttattcacctgttatccgacacctacagcgctgagaagcagctgacccgcgcgctaagcaaattagctcgcgccgcatccagcgagaagctgagtgccgcgttcacggctcacctcgaagagacgcagggacagatcgaacgtatcgatcagattattgagcaggaatccggcctcaaactgaagcgcatgaaatgcgttgcgatggaaggcttaattgaagaagccaacgaagttattgagagcactgagaaaaatgaagtgcgtgacgctgcattaattgccgcagctcagaaagttgaacactacgaaattgccagctacggcaccctggccaccctggctgaacaattaggctataaaaaagccgttaaacttcttgccgaaacgctggaagaagaaaaagaaaccgatctcaaattaaccgatctggctgtcggtaatattaatcaaaaagcccagaaaggatgattaatatctgatgagcatcagcaccaaaaattaaccagaaaataaatcacaggagttaattatgaatcatgtagaacactaccatgattggctacgcgatgcccatgcgatggaaaagcaagccgaatccatgctggaatcaatggccagccgtattgataattatcccgacttacgtgcacgaattgaacaacacgttaatgaaactaaacaccaaattaccgtgctggaagaaattctcgaccgcaatgatatttcccgttcggtcataaaagattccatgagtaaaatggcggcgctcggccagtccattggcggcatgttcccttccgacgaaattgttaaaggctccatcagcggctacgtttttgagcagtttgaaattgcctgctacacctctctgctggctgcggccaaacaagcaggcgataccgcctccattccagcccttgaatccattctggaagaagagcgccagatggcagactggctgctccagcatattccacaaacgacggaacagttcctgctgcgctccgacgcggatggcgttgaagctaaaaaataacgaaatagggagaatgtatgtttcgacacgtaaaacagctgcaatacacggtacgcgtagccgaaccgaatccgggcctggccaatcttctgcttgagcagtttggcgggccacaaggcgaacttgccgcggcatgtcgttactttacgcaaggattgagcgacgacgatcccggtcgtaaagatatgctgatggatatcgcgaccgaggagttaagtcacctggaaattatcggcaccctggtgggtatgctcaataagggtgcgaaaggcgaactggcggaaggcgttgaaaatgaagcggaactgtaccgctccatgaccgagaacggcaacgacagtcatatcacctccctgctctacggcggcggtactccgcttactaactccgcaggcgtaccgtggacggcggcgtacgtggataccattggcgaaccgaccgcggatctgcgctctaacatagcggccgaggcgcgcgccaaaattatctacgaacggcttattaacgtaacggacgatccgggtgttaaagatgcgctggcgtttttaatgacgcgtgaggcagcacaccagctctcgtttgagaaggcgctccagtcgatccgtaacaatttcccaccgggtaaattgccgccaatcgaagagtacaccaacaagtactacaatatgtctgaggggggagaagttcgcggcagctggaacagcgataagcacttcgactacgtggaatctcctcagccagcggtcgatggcggtgacggcggcgcaagcgtaacgctcactacagagcaggaaacgctggtcaaagcgatgtgcgcacgcacgaaatccgaccccaatgccgatccgcttaccggtgccgagcttggtgcaggtaagaaaaaaccgtaaccggttttgccaggcagcctgaggctgtctggcaatgccttgtgcgctatcagttccagaggtacggagcatgttcgagcttgatgcgtttcatctggccaggatacagttcgcctttaccgtctcttttcatattctcttcccggcgatcaccatcgggcttgcgagctatctggtggttctcgaaggcatgtggcttcgcaccaaaaatgatgtctggcgctcgctataccatttctggctgaaaattttcgccgtcaactttggtatgggcgtggtttccgggctggtcatggcttaccagtttgggactaactggagcggcttttcccagttcgcaggcagcataaccggccctctgctcacctatgaagtactaaccgccttcttcctggaagctggtttcttaggcgtgatgctgttcggctggaacaaggtcggccccggcctgcacttctttgccacctgcatggtggcgctgggcacgctgatgtccactttctggatcctcgcctccaacagctggatgcacaccccgcagggcttcagtattcagaacggtcaggtcattcccgaagactggctggccattatctttaacccctcattcccttaccgcctgatccatatgtccatcgccgccttcctgtgcagcgccttgtttgtgggcgcatccggggcatggcatctgctgcgcggtaacgatacgcccgctattcgcacaatgttctccatggccatgtggatggcgctgctggtcgcgcccattcaggccgtggttggggatatgcacggcctgaatacgcttgagcaccagcctgccaaaatcgccgcgattgaaggccactgggaaaacccgcccggcgaggccaccccgctgctgctgtttggcgtaccggatatggaagaggagcgcaccaaatacgggcttgaaattcccgcgctcggcagcctgatcctgacgcacagcctggataaacaggtcccggcgctgaaggatttcccgaaagaggaccgccctaactcgctcatcgtcttctggtccttccgcattatggtcggcatggggctgctgatgattacccttggcgtgctgagtgtctggctgcgctatcgccgtcgactctatcactcgcggctattccactggtttgccctctgtatggggcctgccggactgctcgcgctgctcgccgggtgggtcaccaccgaagtgggccgccagccgtgggtcgtttacggctatctgtgcacgatagatgcggtgtctctgcacagcacgttgcagatgagcatcagcctgctggcctttatcgtggtctactgttcggtgtttggcgtgggttatgtgtatctcgcccggttgattaaaaaaggtccgcagcctgtgggcacgctaacgtctaatacgtcgggcactcctgcccgtccgctgtccgccgccgagtccgttccggaagaggagaagatctgatgggcgtcgatatcccggtcatctggtttgccattattgtcttcgccacgctgatgtacatcatcatggacggtttcgatctcggtatcggcatgctgttcagctttgtgggcgatgccaaagagcgcgacgtgatggtgaacagcgtcgccccggtctgggacggaaatgaaacctggctggttctcggcggtgcagggttgttcggcgcgtttccgctggcctacgcagtgattatcgatgccctgaccatcccgctgacggccatgctgatcgggcttattttccgcggggtggcgtttgagtttcgctttaaggcgaccccttcacaccgcaaattctgggactactcctttgccggcggttccctgctggcaaccttcagccaggggatcgtggttggcgcgatgatcaacggctttgacgtggaagggcgtcgctttgtgggctcctcgctggactggttcaccccgtttaatctgttctgcgggctgggcttaattgtcgcctataccctgctggctaccacgtggctgatcatgaaaagcgaaggcgcgctgcaaaaccggatgcgcgagttgacccgccatgtgctgctggcgctgatcgccgttattgcggtggtaagtatctggaccccgctcggctggcagtttgtcgccgagcgctggtttactctgcctaacttcttctggttcctgccagttccggttctggtggcggtattcagcctgtggatctggcggctgacgcgcaatcccgacagccatgcccgtccgttcctgttaacgctgggcctgatcttcctcggctttagcggcctgggcatcagcctgtggccacacattattccgccgcacatcaccctgtgggaagccgccgcgccgcctgccagccagctgtttatgctgattggtacgctgttaatcatcccggtgatcctggtttataccgcctggagctactacgtcttccggggcaaagtgtctgataccgaaggttatcattaaggattgctatggcaggctggcatacacgcgccattatttaccagattgataccgccctgttttacgatcttaacggcgatggctgtggcgacatcgccggaatcaccgcgaagctgcgctacatccgccggatgggcgcgacggttatctggatcaccccgttttacctcacgccttttctcgatgaaggctatgacgtgagcgaccatttgcaggtcgatccccgcttcggcaagctcaacgatatcatcgcctttattgaacaggcgcgggagctggggatgcaggtcattattgagctgctgatccagcatacctcggatgcgcatccctggtttcaacaggcccgccgcaacccccagtcaccctaccgtgactattacctgtggtccgacacggacgacgacgatacgccaccgatgttccccggcgtggagaagagcatctggacatgggacgacgaggcggggcaatactaccggcatatgttttatcaccacgagccggatctcaatctggcctcccctgcggtgctaaaggagattgagaacatcatcatcttctggctaaagctcggggtgtcgggcttttgcctggatgcggcatcgcacctgacaaaacaggccggacgtggggatgaaaaacgcggcctgtggatcctggagcatctgcgccgtcttatcggacagcgtaacccggacgcgatcctgctcggcgaagtcgacgtggaggtcgaggcctacaaagattattttggtcagaacgaccggctcaacctggtgctgaatttctggctcaataagtacttttacgtcagcctggcagagaagagcgcacgaccgctgcgcaacgcggtgaagaagatgattgtgccgccggactcctgctgcttcgccaactggctgcgcaatcatgatgagctggatctggaagggataggaaaaaaagcgaagcagaccgtcatcgatacctttgcccctgataaagagatgagtgtgtatcagcgaggtatccgccgccgtctggcgccgatgcttaatggcgatcgaaagcggctggccttttgccatgcggtcttgttttcgctgccgggcgtaccggtcatgcgctacggggatgagattggcatgggggatgatttggatctggaggagcgttacgccgtacgcaccccgatgcagtgggccggatcgcaaggcggcggtttctcagatgccgacccggaaacttttgtcgccccgatgattgaccacggcccgtaccgctatcaaaaaatcaacgtggcggattcgctgttgcaccgcaactcactcctgcactgcattatcgatatcgccaatacgcgctcggagttccctgagatcggcgtcgcgccgtttcgtcttattaatatcgacagcgatgcggtactggggatctattacgaaaccgacacgcgcagcattctgaccttcgtaaacttcagcgataagcccgttaattttaccgccagagggatccggcatgcgacctggaccgcctgcctggcggacaaacgctacgacgacgcgctggtgtgcggcaaaaccgtcgcgcttaacctcagcggctatggctaccgctggttctggaccgatcgtaccgcactgcgctgattatcgtctccgcgagagcagcagacgggccacgatcgcgcccgtgacggcaagggagccgagcagcactttccccggcatgccggaggtgacgctgatagcgcgctcttttgcttcgtcggtgaagtgcccgtggattttatgcaggtcgttgaccggctgatccagatagtcctgacggtcatccgcatttaacgtatcggtcatctgcccttcccaggcctttttaaccatcagccgatccagaaagccggggaaaagaaattgcccgacaatcgactggacggtgctgctgcccacccacagttcccgcaccggtttctgcgccaccttaaaaatagcgctggcagctacttccggctgaaaaacgggaggaaccgggcgcatcgcccaggcaaatttattcctcgcccactcgaactgcggcgtattgaggcctggcatctgtaccattgcgatctgcacccggctgttttcatgcatcagttcggtgcgcacggcatcggtaaatccgcggatcgcggctttcgccccgcagtaggctgactgcaagggaatggaacggtaggccagcgcggagccaacctgaataatcgttccgcgatcgcgtggggtcattaactccagcgcggcgcgggtgccgttaacatagcccagataggtcacctcggtgacgcggcgaaactcctccggggacatggtgcgaaacggcgccagcatcccgcccatagcgttattcacccagacatcgatggccccaagccggtattcaatctcgttagcagcatcggtcaccgccttgctgtcggccacgtcggcctgaacggcacgggcgttgatcccaaaacggcgcaactcctcttctgtggagcgcaggctctgctcgtcgcgggcaatgatgcccacatcgtagcccgctttggcaaagtgcagcgccgtggctttccccacgcccgccgtaccgccggtaataacgatcacagccatagcctttccccttgtttcagacgttatcccagccggagagtatttcgatcagttcagacagggaataacgcaccgctttatccaccacatcctgacattcaccggaaaacagcacggtgcgggtttccgtctgtccgcgaatattccagccgaagcagaccgtaccggctgcggtgccatcgtcgccgccttccggtcccgcatagccgctgatggcaaggccgatatccgcctcggcaatttcgcgaattttagcggccatctcggtcaccgtttgttcactgacggcggtgaagcgctcaatggtttcgtgccgcacgccgaggatcctctccttcgccgcatcgctgaacaccaccatgccaacgtcataaaattccgccgtgttctcttcggcacaaagcgcaaccgcgagattgccgccggtacaggactctgcggtggttaaccgcaaacctctgtccgtaagctgagtggcgagctttttcgtcagctcgctgatggtgctgttgctgtcgtgaataaggttgctcatcgcgttgccccttaattttcgtcaggaataatagaaatatgaccattacgctcaagaatagcgtatttaatttccttcaattctgtaataccgtgattctggcgggctgataccaatatatcatcacaggatacatcgacctttttcagtttatcggcaaggggaacaccgttctccaccaatatcaccggcgtgccatcaagaatattctcgacagtggaaaaatattttttcagcaggccaaaaataatatccacaaccaccagcgtcgttattgtaatcatcgcgccggtgacggagaaatcttcgccaagcagcgcctgttgtgtcgcctcactgataattaagagcaaaataaggtcaaaactggtcatttgtagcagagcgcgtcgcccggcaactttaaacacaatgaccagaaacaggtaaattgccagggcacgaaaaaccatgtccatattcgactcctaggggtaaataaactgccagaaatggatatctggctcgttgtttacgcggatactgtttgtccacttccctgcttttgacggcgtgataaataacaaaacggtaaatttatcggtctgttgtaaacgatcgtagacgagaaacagggtattcccccggctgtacatgctgtccggctgtggccagacgctgcctggctcatacgcgtcgctgctttcgctggtcatgctgagggtatatttcccctcagacgtcaccggaaacgtcagtgccatccgcgattcggtctggcggcgaccgaagcgctcatagctcagggtcagggattttgcttcgtttgttttctccacgtcgctgaccgcaccgctggaaaacaggccggctatcgcggccacgataatagctaacagcacaataaaacccacctggcgaaatgcatactcaaacgtcagtaaacggctactctcttttatcccaggcactttttcattttttggttccatggctgtggtcaccgtttcgcttaattgccgaaatttatgatttttctgtgcaaacgcttttaagacttatcacatttgccacataaaggaatagcaacaatacttaataagtcaagacatccaaaatgaaggatatcagatgaaattatcagtgatttcagccttgttaatattaattatccctactgcatgggcagataataacggcgggttacaaaagggtgacgcgccgccaccgccgcatgcgctggacagcggttatcgtggtaccgatgatgcgcgcattatgaccattactcaggcgaaagagatgcatgatggcgcctctatttcactgcgcggcaatcttattgacggcaatggcgataaatacgtattccaggataaaaccgggaaaatcgacgttattatcccgaaagccgtatttgacgacagaaccgtggaacctgacaacatgatcagtattagcggctcgctcgataaaaaatcatccccacccgtagtgcgggtcagccacttgcaaaaataattcagcgaagcgttaacgctgtaactatccatcaaatctcacccctaacaaggagttagctatgagtgataatgaacaacgtacgaacgcttacccaacgccacctttcccggagcagcctcagacgccaccgggcctggcctctgagatggaacccgtacccgaccacggcgagaagagctacaaagggcatggtcgtcttgccggtaagaaggcgctaattaccgggggcgattccggcataggacgcgcggtagccattgcctatgcccgcgaaggggcagatgtcgcgattaactatttgccggaagaggaagaagacgcagcnnnnnnnnnnnnnnnnnnnnnnnnnnnnnnnnnnnnnnnnnnnnnnnnnnnnnnnnnnnnnnnnnnnnnnnnnnnnnnnnnnnnnnnnnnnnnnnnnnnnnnnnnnnnnnnnnnnnnnnnnnnnnnnnnnnnnnnnnnnnnnnnnnnnnnnnnnnnnnnnnnnnnnnnnnnnnnnnnnnnnnnnnnnnnnnnnnnnnnnnnnnnnnnnnnnnnnnnnnnnnnnnnnnnnnnnnnnnnnnnnnnnnnnnnnnnnnnnnnnnnnnnnnnnnnnnnnnnnnnnnnnnnnnnnnnnnnnnnnnnnnnnnnnnnnnnnnnnnnnnnnnnnnnnnnnnnnnnnnnnnnnnnnnnnnnnnnnnnnnnnnnnnnnnnnnnnnnnnnnnnnnnnnnnnnnnnnnnnnnnnnnnnnnnnnnnnnnnnnnnnttgttgcaggcgaaagctaaagggctgcgaaagcagcctttttacgtttaaggggtgacgacaggaaaccagaagctgaagctctccatgcagcgcagcatttcgttcaccttcgcggcattgccgacgatcgtcacctctcctgcctgttgcgcctttttcaacgtggtctctttgaggatgattttattcagcgtttcgcggctgagcgtgatggttgcatccggatcttgtgcctgagcgttggcgctatggttcagcacgccattctccagctccagcttgtacctgccgccctcgcggcccagatcaacgttaaaaatccctctggcattcgcggctctgacgccgttaaggtgaacgccgaagtagtcaaaaatcatctcagtcgacatggcacggaccgcatccgggctggcggtattgggcgtcggcatcctcttcacgccgttacgcaacgcctgcgcaccggtgaggtaggcgttacgccagggtcctgactcagcctggtatcccagctgttcaaacgcgtccgcttccagttcgcgcgccgccttattattgggatcggcaaaaacgactttattcatcacctgcgccacccagcggtaatttccccgggcataatcaacccgggctttttcaaggatcgcgcgggctccgcccatgtaatcgacatattttttcgccgcctcgaccggaggcagttcattgagcgtcgccggattgccgtcgaaccagccaagatagtagacataggtggctttgacattgttgcttaccgagccgtaatagccacggcctgcccaggattttgccagcccgtaagggagggcaaaattagcggctatctcatccctcgtcagccctttattcgccagcctcagcgtctggtcgttgatatagcggtagatatcacgctggcttttcatcagcttcaccactttcttattaccccatgtgggccagtggtgctgcgcgataataatttccgctttatccccccaacgatcgagagcgttattgatgtattttgaccatgccagcggatcgtgtattttcgccccgcgcagcgagtaagtattgtgcagggtgtgagtgacgttctctgctgcttcaatcagctttttctcttccacataccagagcatttcagacggcgcttccgaccccggcgccagcataaaatcataggtgagaccgtcgatgatctctttctgcccgtctttggtaatggcatgagtgggcgcgataagggtgaccgtcccggctgaggtggtcgtgcccagacccgcccctacctgaccttttacattggcctttaacaggtttccgtagatataactggcacggcggctcatggcatttccggccatgatattttccgataccgcctcttccataaaacctgctggagcatagactttcactttgccggtcatcactcccgcttcatcgactacgccacgcacgccgccataatgatcgacatgactatgggtataaataacggcaacaaccgggcgtttgccacgatgtttaacgtaaagatccatgcccgctttggccgtttccgcagacaccagcggatcgataaccgtgatcccctctttgccctctataatcgtcatattcgacagatcgaggttgcggatctggtagacgccttccgtgacctcaaacagaccgccaatattattcagctgcgcctgacgccacaggctcgggttgacggtatccggcgctttttgcccttctttgataaaagcgtatttccgggggttccagataacggcgcctttttcgcctttaatcaccgtgggtggcagcggggcaataaagcctttgtgcgcatttcggaaatcggtcttatcaaagaagggcagttgaccataaagtgcatcattcatctctttcgtatgggcagtggctcccttcccttccttttgtgccaggacaggcaatgaggtcaacgagactaatagcagaccagcaacggccatcgcactaacgagcgttttaaatttcatacttcctcgaggagttatattcacgctggcggtacatggggggaaaggaggctatcaccaggcttatctttaacctatgaaaataacgtttataaataaataagtttattctttcgtcgctgcgtccttaagggataatgctgagtccagttatttccccggagtaattcgatgaagagcctgccgttctttttcactgtattaaccctcagcacattaacagcttgtagttctccccaaccagacaatgttgaaaaaattaatcatctgaaaattccactggtgttgccgggggaaaaaccgccgcaggcacagatatcgcatatcgcgtctctttatcaggaaaataaacagcagatcgagaccttaacgcgtagcgtaaaatcacagtatctacaggacaccaccgcaaaagaaatttttgttgcggacagtgacgttcaacgcgtctatgcctcgctgaccaaactggaacagttagatatggttaatcagcaatacctgaaagataataatgtcacgggcctgcaaaatattcatatcattcttgaaccgttattcaccagctgaaaataaaaaacccggcaacataagcagccgggtttttattaatgggtatatcacgggcatcagtcgtactgaccaaagcgatagctaagccctgcggtgacggaactcaggtcgctgctcacgccgatctggttaacattgcccacgttgcttacccactgatactccaggcgacccgcccagtttttattgaaagcgtattcagtacccacggctgcaagcgggcgcacaccggtttcaaaacgattgtgaccacttacatcggattcagcgcgatagcccattgcgccggcacggccgtaaatatcccagtcactggacagggcataactggccttcagagacatttgcagcccctgcgtcttcatttgcgccccggcgccatgctgacctttaatctgcatgttacctaaataatcataaccaccttctaccgcaagccatggggtaatctgataacccgtataaacacccccgccgacattatcatggttaaaatcgaagtgatcggaatacgtgttctcaaacgcttttgaacccatattggtatcaaaatagtgagaccagccgaatttagccccgctataccaggtgcccgcatcagcggcggcgaacgcggaagtggcggtaaatgcattagccataatcaatgcgataactgtctttttcataaatataccgtttacttgataatgttaaatctgagaaagcaaacgatatagaaaattaacggtagcgttaattgcatttctgtttaattttaaacttccgctagaatgactcgggtaaatgtctgacttcaagcagatatccaccgcgcttaaaggcgatatattccccctgcttaagggcggataatacattgagtatactgctgcgagagagcagcgtacgatcctggatatattccagaatcgtggtacgcaaacgcgtctcttccgggagcaaaatcatttcctgaaggtggttacgaataacggaataggtacgctgctggagtacctgggcatcacgaaatattaaataggccgtatggtaagaaagcagcgcggcgacatcctcccagacgccctcggcacgaaacaactcagccgccttgtccgcatcgagacgtaaaatagtcgactctctttcagcacggagaaggtgcccctgcgtaggctggatcatctctgcaataccaaacaaatgcggctcgtaaacggtcactaccaccagtccatccgaagcccgcagcagggacagctccccttccagaaagaggtacatctgctgtttccccttccgtaaccaggtgagtcgtttacgcggaacaacgtgcactttctccgctatcggctcaaggatggcggtcagtcgttcgatggatttttcgggtcgaacaggcggtaaaatatgcatggtacaaccttctgacattcaatatctgccattatagaccatatattttaagcggttagccgatcaaaactgatagctgtagttgacgctggcaaaccaaagataaggatgatcgtaacttccggcaaacgccgtcggggatttcacatgcgacgactgcatatgaagatacgacacggcaataccaatattgctggccggggtgatctgatactgggctcccgtgccaaatcgccactcatcgccggtgggtaaggttaaggccacatcactctggctctcatacggcgagctgtcgaacgccacaccggcattcagtcgccactgaggtgttggacgatactgcacgcccaccgcgccgtgccacgtatccttcaggcggctgacgttgttcagttgcctgtccccaacgacgatttgcggggcaccgaactggctccagtcctgccagccgagatcgcccataaccgaccaccgagggttaatatcatgcacaagactgagcatgatttgctgcggcgcgctgatttgtgccgacaccgggaggtcgtaggtgccgttctgtagacgcgcgttgccgtcaatattgaagctgtagtccgtttcgctgttccaggtaataccggctcgggtctggtcagttagctgcatcagcagcccaagccgatagctcatggctaggtcttcatcgcgtcgccggtagtcatcatcgttaacgctgcgagtcagcgagaagtaaccgtagttaacgttggcggacgcgccaatcgaaagacggtcgttaagcttataggccagcgaggggctgagcgtcattgcgaccatagtactctttttaattagcctgtcgcccgcccagctgccatagtcgatccccagaccgtaattaccgtaaagcccgatcccggcataaagatcatcgtttatcttctggctataaaaggcgctggcattcgggatggttttcatcacgtcgtcggggctttgatgggcatggttatccagctggttgtcgatggagccatccataacctgcaacccgccagtgaccatatgatccggcaggcgcgtcatgccagcagggttggtcatgattgtcgaggcatcctgcgcacgagccgcctgccctgctccggcaagcgcggtatcttcggtgccggcttcataaaaatagagggcgctggcatgggcactggaggcggcaaataagcccgcgcacaggaggagtcgtgttttcatctgcgatccgggaaataaaaaatttgccgacagatataacaggggcgcctgatgacgtaaaaaggaagagggtttaattttaaattatgcgcggttcagcccctcttaatatctctgacaattcagcgacgtccggaatacgacgccgctacgtcctgcacctgtaatacgttcaggtacaggacgataaaatccaggaattttgttcaggtttatccggccttacttataatgctccagattggtttccgggcccgttctggcaatttcctgagctttgccgaaactttcaatcaggcacttatattccggacagacatgctctgccaggatctcagcaaagcgagaaccttccgcgcggttccaggttctcattaattcagcgacaatggcaaacgtatcggtagggatcgctcccgcctgagccacgcgcgcgatggtggtatcggtcgcgattttggaccagttccccgaggcatccacaacacagtaaaccttatacccctcctggacagcgctaaccgcagggaacgccatgcagacgctggtgagcgttccggcaataatcagggtctttctgcccgtcttttccacttccttcacaaacgccggattatcccaggtattaatctgcccggtgcgtggaacatacacggcatggggtgcatatttgtgaatttccgggatgagcgggccattgggaccgtcaggaacagaggccgtggtgatcaccgggatatttaaaagcgtggcaactttggctatcgctgtcacataattacgaaggtctggtacaggcacatcacgtaccgtgttgaataagccactctgatggtcgatgagtaaaattacagcgtcatcagtatcaatcataccgtttgtagcagccatatttctttcctcatgatttcttttacattgccgtcaactctcccggctccgcgattttacatgcacatggtcagggtataatgcattgataaatcataatgaatagtagtccgatccggtctgaataccgcatcatttcaggacaatttctggcacggtacgctgagccatcgacgctgacggaaagccctcgtgaggagaagagatctttacaatgccgttatgcggccattcgtattcgttcggctgaaggcaagcgttactcactactgggatcgcccttatcctcccgcatggattcgataaactcccgttgctcctctgtgagttcaagctcatccagcaagcgatctaactcttcttcaggtgattccttttggttctttctcttcccggtagccatactcacccttgagttattaggattaatctcagggtatccagggtacaggaaatgtgcaacttagcgtgttatgccgacaaccgatcataacaatgaacgaaagggggaagcaggtacgccagtacaggaaagactgataggggtattcctgttccggcgatgaaagatagccaattgaaagccttgccagattacatacgggctttgcaataatcgagagggtgcaatgcctaccttccctttagtttaacttaactcaaatttaatcacatttaaattaatgattttgttagatttaatcgtttattgccctctcacacataggtacactttctctatggttttttttataacagcatgaggaaaagtgaaaatggctattccagcttacctatggcttaaagatgacggtggcgcagatattaaagggtctgtagatgttcaggatcgtgagggcagcattgagatcactggattttcccataatctcagcattccaacggacttaatgactggaaagatcacaggaacccgcaagcactctgccgtgctaattcaaaaagagtttgatagctcctccccttatctttataaagctgttgctactggtcagacgcttaaatctgctgagttcaaatggtataagatcaacgacgcaggacaggaagcggaatacttcaacatcctgcttgaaagtgtgagagttgtcggcgtttctccagtgatgcacgacaccaaagatccgaccaaagagaagcacaaccacctcgagtgtgtagaacttcgctatgaaaaaatcacgtggaaatactgcgatggcaacgttcagtttaccgatgcatggaatgagagagcgcaagcgtgagatacccaacattagcagcatcacctcatccgccttttgatgtgtcatctttcgccccgccaggtgtgaatatcgtcaataatatgatgatggctcgctttcaccgcggtccgtcagcccttacctatgcatggttttatcagcaggtaagaggccatggtccgtgggattacaaacagcacgggagacagttcgagagcttcggaaacttccattatggtgctgttggccacgctgcggggatttccggcgaagtattacttagaggcgcaggatgggcgcaaagccgcgcaggaacaacggatccggcttttggtgattggtttggctcaacgccttacggtgatgatcctaacgaccagtactggataagagcgggtatcgactatgcaaaacgcacaggtttttaagaagcggtatctacttctgatcctgttggctgttgtcgcctatgggatatacaacttgctgtacttctcaccacttgagcaagtgattattaagaaggtgaaagttaacaatctggctaatctttacatcacagaagcgagtgcaggagccaccacaggcttttcctaccgtttctatctctatgatgtaaccaaagatgataaagcgtttatggcgagtctggagaacgatcaccagcctttcatgatcaccacggacaaagatgcattgaagaaggtcgagaataatgcgatctacctttccgtgaagggaaccatttacacctttcacagccctgcggattatctggcaggtggctcgatctactccgtccctgtctatttaaccgcatcaccatactaaaaacatagccagctgccacgctggctctttctcttctggttttagacaacagaaaccattaagccccttagaggttagaagacaagcgaagcacagcgatttcataagactgtcagagggttacctgcatttcgtgtgcagggaggacgtcaatgctctacaggacataacgcctaaacaagttagtcagcgctactgagcaacctactgaaataaagaaagtttttgaacggttctacttggggaaattctggagcgggcgaagggaatcgaaccctcgtatagagcttgggaagctctcgttctaccattgaactacgcccgctttgaggtgcgtaaggcattatagaccttacgcctcttcatacaagcctttcccccactaagtggcgattaaataatcacttagcacttcggcttactgccctgcgccggaagataacgctgcggatcgatggccgtggccttatagcggatctggaagtgcagcttcaccgtatccgtcccggtactgcccatggtcgcaatcttctgccccgccttcacgttctggccgttattgaccagcatcgtgtcgttatgcgcatacgccgtaatgtagtcctcaccatgcttaatcatgatcaggttaccgtatccacgaagctggttaccgacatagaccaccttcccggcccctgaagcgtaaaccggtgtgccgcgtgcggcagcgatatcaatacctttattgccaccttccgagagcgagtacggcgcaaccacttttccgcttgcaggccagatccagcagcgctgaccgaccggcggccaggatgatttaggcacctgataggatggcgtgactttggctgttttacgcgttgaggactttttccctgaggaggaaccgccgttaaccttgagcttctgccctacctcaatagtatacggtggagaaatattattcaggcgcgccagctccttcacgctggttcccgtggcgcgtgagatacggtagagcgtgtccccgcgcttaacggtatagactgcaccggaataactgcccatatccgaagatttactccccgagcatcctgctacaagtagcgtcagcgtcaggcagaaaacggcaatgatcgggtttctcgtcaggcttcctgcaaacaaaacagctcctcggtcagcgtgaatggcgcactatgatagcagcccaaactgatgcgggtcatgcccttttccgctctgtgggccaaaccgttcgcataagaatgcagtataataattccgctgatggtgctgaaccattaagcattttggcactggagcatcaatgagtattcaagaacacgttattttggtaaatgaccagggaaaagtgattggcactcaggagaagtacgccgctcacacgtcacacaccccgctacacctggccttctcttcatggctgtttaacgctaacggagaatgtctgatcacccggcgcgccttaagtaaaaaagcctggcccggcgtatggaccaactctgtttgcggtcatccacaggccgacgaagcgacagagcaggcgattatccgccgctgtcgatttgaagtcggcgccgaaatcacagacattacccccattgccccggagttccgctaccgtgaagccgacccgtcagggatcgttgaaaacgaaatctgcccggtctatgccgcccgcgtaacgaataccctcgcaatcaatgacgatgaagtgatggagtatcagtgggtggagctggacgcgctattccgcgcgctggacgccacaccgtgggcatttagcccgtggatggtgcaggaagcgaacaccgcgcgtgaaaaactcagcgccttcgcggcgcaataaaaaagccccggtgataaacgcacggggctttttttacgtcttaacggcttatttcaccggacgcatcgccgggaacaggatcacgtcgcggatggtgtggctgttagtgaacagcatcaccatacggtcgataccaatacccaggccagccgtcggcggcaggccgtgctccagcgcggtcacgtagtcttcgtcgaagaacatcgcttcgtcgtcgcctgccgctttcgcgttaacctgatcctggaagcgctgcgcctgatcttctgcatcgttcagctcgctaaagccgttaccgatttcgcggccaccgatgaagaattcgaagcgatcggtgatttccgggttctcgtcattacgacgcgccaggggagacacctccgccgggtattcggtgatgaaggtcggctgaatcaggtgcgcttcggccacttcttcgaagatttcggtcacgatacgacccaggccccagctcttctcaaccttgataccgatgctttcagcgatcgctttcgcagagtcgaagttatccagatccgccatgttggtttccggacggtatttcttgatcgcttcgcgcatggtcagtttttcgaacggcttgccgaagtcgaacacctcttcaccgtaaggcacctgggtggtgcccagaatgtcctgcgccagggtgcggaacagggattcggtcagctcgatcagatctttgtaatccgcatacgccatatagagttccatcatggtgaactctgggttatgacgtacggagataccttcgttacggaagttacggttgatctcaaacacgcggtcgaaaccgccgaccaccagacgcttcaggtacagttccggcgcgatacgcaggtacatgtccaggtccagggcgttgtgatgggtgatgaacggacgggcagaggcaccgcctgggatcacctgcatcatcggggtttctacttccataaagtcgcggttaaccatgaactggcgaataccggccatgatctgggagcgaattttgaaggtcttacgggattcatcgttagagatgagatccaggtaacgctgacgatagcgcgcttcctgatcctgcaaaccgtggaacttgtccggcagcgggcgcagggctttggtcagcagacgcagttcggtgcagtggatagacagttcaccggtcttggttttgaacagtttacctttcgcgcccaggatatcgcccaggtcccactttttnnnnnnnnnnnnnnnnnnnnnnnnnnnnnnnnnnnnnnnnnnnnnnnnnnnnnnnnnnnnnnnnnnnnnnnnnnnnnnnnnnnnnnnnnnnnnnnnnnnnnnnnnnnnnnnnnnnnnnnnnnnnnnnnnnnnnnnnnnnnnnnnnnnnnnnnnnnnnnnnnnnnnnnnnnnnnnnnnnnnnnnnnnnnnnnnnnnnnnnnnnnnnnnnnnnnnnnnnnnnnnnnnnnnnnnnnnnnnnnnnnnnnnnnnnnnnnnnnnnnnnnnnnnnnnnnnnnnnnnnnnnnnnnnnnnnnnnnnnnnnnnnnnnnnnnnnnnnnnnnnnnnnnnnnnnnnnnnnnnnnnnnnnnnnnnnnnnnnnnnnnnnnnnnnnnnnnnnnnnnnnnnnnnnnnnnnnnnnnnnnnnnnnnnnnnnnnnnnnnnnnnnnnnnnnnnnnnnnnnnnnnnnnnnnnnnnnnnnnnnnnnnnnnnnnnnnnnnnnnnnnnnnnnnnnnnnnnnnnnnnnnnnnnnnnnnnnnnnnnnnnnnnnnnnnnnnnnnnnnnnnnnnnnnnnnnnnnnnnnnnnnnnncacgaaggacgctttacccatgatacgacgggtcatcatgcggcccgccacggacacttcaacgttcagcgcttccagctcttcgttctctttaccgtcgaagtctgcgtgcagttggtctgaggtatggtcacgacgaaaatcgttcgggaacggcacgccctgctcgcgcagcgctgccagcttctcgcggcgggttttcagttcgttgttaagatcgactaccgcgtcagcgccctgtgcttgttgttcagacatgttggttcctcataaccctgctttcaaacttgcttcgataaattggtccaggctgccgtccagcaccgcctgcgtgttgcgggtttcaaccccggtacgcaggtctttgatgcgggagtcatcaaggacgtaagaacggatctggctgccccagccgatatcggacttgttgtcttccatcgcctgcttctcagcatttttcttctgcatctccagctcataaagcttcgctttcatctgcttcatggcctggtctttgttcttatgctgggaacggtcgttctggcactgtgttaccagcccggttggaatgtgggtaatacgcaccgcagattccgtacggttaacgtgctgaccacccgcgccggatgcgcggtaaacgtcgatacgcaggtccgccgggttgatgtcgatatcgatatcttcatcgacttccgggtagacaaacgcggagctgaaggaggtgtgacgacggccgccggaatcgaacgggctcttacgcaccaggcggtgaacgccggtctcggtacgcagccagccgtaagcgtaatcgccaataatcttgatggtgacggatttgatacccgccacttcaccttcggactcttcgataatctcggttttgaaaccgcgcgcttccgcccagcgcaggtacatgcgcatcagcatgctcgcccagtcctgcgcttcggtaccgccagaacctgcctgaatatcgagatagcagtcagcactatcgtattcgccggagaacatgcgacggaattccagctgcgccagcttctcttccagcacgtcgagctctgccacggcttcgttaaaggtttcttcgtcgtcggcttcgacagccagctccagcagcccagaaacatcttccagaccctgcgccatttgatccagcgtatctacgatggcttcgagggaggaacgctctttacccagcgcctgagcgcgctcaggttcgttccagacgtccggctgttccagctcggcgtttacttcttcgagacgctctttcttggcatcgtagtcaaagataccccctaagaacgtcagagcgctccgtgaggtcctgaatgcggttttttaccggattaatttcaaacatggtctgttttcttttatgagcttgtcaaaatgcggtgataagagcgggattgtaccgaatccacgcccttttttatagagattactgacgctaaattggccagatattgtcgatgatgatctgaagggagcggttaccgcggaactcgttaatatccagcttataggccagctcaacctcgcgcacgccgttgtccggccagatggaggtatcaacgttaaaggcgatgccgtcgagcagcggtccgccgccgaccggttccaccatcactttgagatggcgttcgcccacgatgcgctgttgcagcaaacgaaaacgtccgtcgaaaagcggctccgggaacatctgcccccacgggccggcatcgcgcagcatctgcgccacctccatggtcatttcagccggtgaaagctcaccgtcagaaaccacttcaccctgcaacagagccggatcgatccactcggtgaccagttcgccaaacagacgctggaattcgtcgaacttcgcctcttccagcgacaggcctgccgccatcgcgtgaccgccgaacttaatcatcaggttcggatgcagcgtatccagacgctccagcgcatcgcgcatatgcagaccctgaatggaacgaccggagcctttcagcgtgccgtccccggcgggggcgaacgcgatcaccgggcggtggaaacgctctttaatgcgcgacgccagaatgcccaccacgccctggtgccattcggggtgatacatcgccagcccgcccggcagggtatcgccgctgcgctccagcttttcgcacagggtcagcgcttcggcctgcatgccctgctcaatctctttacgggtctgattgagtgcgtccagctcactggccagcacacgcgcttcgccgatgttgtcgcacagcagcagcgcgacgccaaccgacatatcatccagccgccccgccgcgttcaggcgcgggccgagggcaaagcctaaatcgcttgccgcaagcttcagcggatcgcggttggcaatttccagcagcgccttaatccccggacggcatttacctgcccgaatgcggcttaagccctgccaggtgagaatacggttattggtatcgagcggcaccacgtccgccacggttcccagcgccaccagatcgagatactccgcgaggttcggcacggcaatcccgcgcgattcgaaccagcccttatctcgcagcaacgtgcgtaacgccagcatcagataaaacgccacccctactccggccagcgatttcgacgggaaatcgcagtcgcgcaggttcgggttaatgatggcttcggcggcaggcagagtttcgcctggcaggtggtgatcggtgaccagtaccgggatccccagcgcatgggcatgatcgacccccgcatgagaagagatcccgttatccacggtcatgatcatctgtgcgccacgggcgtgggcctgatcgaccacttccgggctgaggccgtagccgtcttcaaaccggttcggcaccaggtaagtcacgttatcgcagcccagcgcacgcaggctgagcacgctcagcgcggtactggttgcgccgtcggcatcgaaatcgcccacaacgacaatccgcgtgccttcccggaacgcgtcgtagagcatttcagtcgctttttcgatgccactcagcgcttgccagggcagcatgcctttgacgctgcgctcaagatcgcttgccgtacgcacgccacggctggcgtacagccgctttaacagcagcggaagcgtgtctggtaaatccgcggtttcacccgcatcgcggcggcgcagttttatcggggctttcacgcgaattatttaccacccatctgtttctggtgctcgtcgaggaacgctttcatctcttttggcccctggtagcccggcaccacgtagccgttactcagcacaatggctggcgtaccgctcacgccaaactgtacgcccagcgcgtagtggttagcgatgtcgatatcgcaggacgcgggcttcacgcctttgccgttcatcgcgtcatcaaaggccttgttgcggtctttcgcacaccagatcgctttcatatcctgctcaggctggctctgcacgccggcgcgtgggaaagccaggtaacgcacggtaatgcccagcgcgttgtagtctttcatctcttcatgcagcttgtggcagtagccgcaggtgatgtcggtgaagacggtaataacgtgcttttcctgcgccgctttgtagacaatcatctctttttcgagcgcgttcaggtttttcatcagcagctggttagtgacgttcaccggctgcgcgccgctcacgtcgtacataggcccctgaatgatgtgtttgccgtcttcggtcacgtacagcacgccgctgttggtcagcaccgttttcatgccagccaccggcgctggctggatctcgctgctggcgacgccgagtttcgtcagagactgtttaatggcggcatcgtccgcatgggcaataccggaaaccgaagctgccagcagggtgagcagcgctaaagactttttcatatttgttcctgtaacaattcgtcggcactcacgcgcgagggtggtgctgttggtgtagctgccgcaggcgttccgtcgcgacatgggtgtatatttgcgtcgttgaaagatcgctgtgtccaagcaacatctgcaccacgcgtaaatcagcgccgtggtttaacagatgagtcgcgaaggcgtgacgcaaaacgtgcggcgacagcttctcactgtcaatacccgccagtgtggcgtaatgtttaatgcgatgccagaacgtttgtcgcgtcatctgctgcgcgcgctggctcgggaacaatacatctatggagacgccgttcagcagccacggacgcccgtgttccagatacgtctccagccagtagaccgcctcttcacccagcggcaccagccgttctttgttccctttaccgataacgcgcaccacgccctgacgcaggctgatatcgctcatcgtcaggcccaccagctcggaaacgcgcaagcccgtggcatacaatagttcaagcatggctttatcgcgtaactccagcggaaggtcaactgcgggcgactgtaataatctctcaacttgtgcttcgctgagatcttttggcagccgctgaggcagtttaggcgatgccagcagtgcgctggggtcatccgcgcggatcttctcgcggtacaggtgctggaacaggcggcgcatggcgctcagcagacgtgcagagctggtggctttgtaccccccttccatccgctcagccagtaacccttgcaggtcatcgctttgcgcgctttcaagcgtcagcccacgatgtgccagccactcgaccagcagcgtgagatcccgacgataggcgctgagcgtattttcagcgaggtttttctccagccacagcgcgtcgagaaactgttcgatgagtgcgagatccttttccacatcagcccctttggttctgcaatctggccattatgcctgaatgccatcggtttctggtacactacgcgcaaagtcatagcaagaattgagatagttacgcgatgaatattggtctgttctatggttccagcacctgctacaccgaaatggcggcggagaaaattcgtgacatcattggcccggaactggtgacgctgcataacctgaaagatgacgcggttgccttgatggagcagtacgatgtgctgattctgggtatccctacctgggactttggtgagattcaggaagactgggaagccatctgggatcagctcgattcagtcaattttgaaggcaaaatcattgcgatgtacggcatgggcgaccagctgggctacggggagtggttccttgacgcactcggcatgctgcacgacaaactggcgccaaagggcgcgacctttatcggctactggcctacggaaggctatgagttcaccagtcaaaaaccgattattgctgacggtcagctgtttgtcgggctcgcgctggatgaaaccaaccagtacgatcttagcgacgagcgcctccagagctggtgcgagcagattctgggtgagatggccgagcagttcagctgatttactcctgcgtcggctgttgcacgatcaaccggcgcagatctcgccactccgcaggatccatactgtctgcggccagccacaggtgctggcgacggttatcctcgacccgacgcagccgtagcatcatcccggtattaagcatccacggcgtccccatcatctcccactcttttccctgccagcgcaggcgagaatccatcagcagcttaatttcaccctgacgggcgttgattcgacgctggctgcgcacgctgtcaaacaccacaaacgacagcaatagcaaccacagaggggtatagctaagcggccacggcaccaataacaccagtgccgccaccagaccgtggagcagtaaggacatccattgtgagcgccacgagacgcgaagatcagattgccacaggaccacgttcctgattccgtgtttgaattaattgcaccatccgttgcaactcggtgtcggcgggcttgccgtgattcatcagccagttgaataaatccggatcgtcagactcaagcagacggacaaacaggcgcttatcgtcatcgcttaagctgtcgtactcatactcgaagaaaggcatgatggagatatcaagttcacgcatgccgcgacggcacgcccagtgaatacgggccttgttgttaatatccatgttctgtttcctgcattacgtttggcacagtcggtatcccgtttggtattcattattgctctccgggaacacctgctagtgtaacgtgtttttgaccgtttctttactggaatattgcgaacctcgagcaggctccctgaataatccttataaagacagcggattacactattttgcgtagcgccacgcataaccgcgtaatggcacgaatggcctgctgaaagcgcttgcattggatacagtctcttttaccattaggtattatcaaagcgttaagcaattcaggacatcactatggcatttacaccattttctcctcgccagcccgccgcctctgcgcgtctgccgctgacgctgattactcttgatgactgggcactggcgacactgactggtgcggacagtgaaaaatacctgcaaggccaggtcacggcggacgtggcgcagttgactgagcaccagcatctgctggccgcgcattgcgatccaaaaggcaaaatgtggagcaacctgcgtctgttccgccgtcaggacggattcgcctttattgagcgccgcagcctgcgtgacgcccagcttaaagagctgaaaaaatacgcggtcttttctaaagtcaccatcgccccggacgatgaacacgttctgctgggggtcgcgggtttccaggcgcgtgcagcgctgaaaaacctgtttgcccagctgccggatgctgaaaaacagctggtcagcgagggagcgacctccattctgtggttcgaacacccggcggagcgcttcctgctggtaaccgacgaagcaacggcggaacgcgtcactgacgccctgcgcggtgaagcacagctcaacaacagccagcagtggctggcgctgaatatcgaagcgggtctgccggtcattgacgcggcaaacagcgcgcagtttatcccgcaggcgacaaacatccaggcgctgggcggtatcagctttaagaagggctgctacaccggtcaggaannnnnnnnnnnnnnnnnnnnnnnnnnnnnnnnnnnnnnnnnnnnnnnnnnnnnnnnnnnnnnnnnnnnnnnnnnnnnnnnnnnnnnnnnnnnnnnnnnnnnnnnnnnnnnnnnnnnnnnnnnnnnnnnnnnnnnnnnnnnnnnnnnnnnnnnnnnnnnnnnnnnnnnnnnnnnnnnnnnnnnnnnnnnnnnnnnnnnnnnnnnnnnnnnnnnnnnnnnnnnnnnnnnnnnnnnnnnnnnnnnnnnnnnnnnnnnnnnnnnnnnnnnnnnnnnnnnnnnnnnnnnnnnnnnnnnnnnnnnnnnnnnnnnnnnnnnnnnnnnnnnnnnnnnnnnnnnnnnnnnnnnnnnnnnnnnnnnnnnnnnnnnnnnnnnnnnnnnnnnnnnnnnnnnnnnnnnnnnnnnnnnnnnnnnnnnnnnnnnnnnnnnnnnnnnnnnnnnnnnnnnnnnnnnnnnnnnnnnnnnnnnnncatcagaccgcaccttacaaaaaactacacctgcccaacatacagataaattgccaggaagtggcacacgctgccgcccagcacaaagccgtgccagatggcatggttgtacggaatacgcttgcagacgtagaaaataacgcccagcgagtagaccaccccgcccaccgccagaagcgtcacgccccccaccgccagcttaatggctaactgatacaccacaatcagcgacagccagcccattgtcagataggtaaccagcgacaacactttaaaccggtgcgcaatagtcagcttaaacaggatccccagcagcgccaggctccagatcacaatcatcaggccacgcgacagcggtgagttgagccccaccagcaaaaacggcgtataggtacccgcaataagaagatagatagcgcagtggtcaaatttcttgagccatatcttcgcccgttgatgcggaatagcgtgatacagcgttgaggccaggaaaagcaggatcatactcccgccatacagactgtagctggtaatggccatcgcgctggcgttggtatccactgcctgtaccagcaataacactaagccgacaatcccaaaaaccaggccaatgccgtggcttatactgttggctacttcctcagccagcgaatatccctgtgcgattaatggtctgctcaccatacttaactccgggaaaacaaaagatgattattcatcgccagtctatgctaactgagaatgattccagtgaacacctgttagctaaaataaatccaaattcaaaatttatccttataaatcagcataatgtaaaaacaatccaccgcacaggtgtaaatgatttcattaacatctaagtaatcaaggagataaatccgtctcccgcccttcgtcatcatggtatgcttcaggaatagtgtccgacagcgagtttagccattgtgagtatgttcagccattccgccattgccagcctcaacaatctggaaatgatggtctacaactatgtcattaagaaccgcgataaagtgatgtacatgaccatccgcgagctggcggatgcggcgggcgtttccactaccactatcctgcgcttctgccgtaagctcaactgcgatggctactcggaatttcgggtgcgctttaaactctatctggagcagaacgagccgcagcaggcgaattttggtgccagtgaaatcatcagcttctttaaaagcgtaaataacgaagagtttgatgcgctattagataacgcagtcgatattattttatcatctgaacgaattatttttgtcggtgcgggcacctccggatcgctggcaaaatatggcgcacgtttcttttcaaatatcgggaaattcagcaaccatatcgacgatccttatttcccagtcactaacgatatggctaaaaatgcgctggctattgtactctccgtctccggcgaaaccgaggagatcctgcgcttcgccagccagttcagcctgcaccactgcaaggtgctctcagtcaccagccacgaacattcacgtctcgcaaagctggcggactttaacctctcctggcacgtaccgcaaacgcgcattggcggcgtttacgatatcaccacgcaaattcccgtcatctatattctggaatcattaggccggaaactggcgaagaaattaacagaataaaacatcctgtttttttgatgtgacaaattacaatttccgcaaaatgttatatcgtgacatttaattccgctttgctagactcgaaatcaataagtcctgaattgagaatagcaaagatgaaaaaactcaccttaccgaaagattttttatggggcggcgcggtagcggcgcaccaggttgaaggcggctggaacaaaggcggcaaagggccaagcatctgcgacgtgctcaccggcggcgcacacggcgttccgcgagaaatcacgcaggaagtgattgaaggcaaatattacccgaaccacgaagccgtcgacttttacggccattacaaagaagacattaagctgtttgccgagatgggcttcaaatgtttccgtacctctatcgcctggacgcgcatcttcccgaaaggcgacgaaactcagccaaacgaagaggggctgaagttttacgacgacatgttcgatgaactgctgaagtacaacatcgagccggttatcaccctctcccactttgaaatgccgctgcacctcgttcaggaatatggcggatggaccaaccgtaaagtggtcgatttctttgtgcgcttctcggaagtggtatttgagcgctacaaaaataaggtcaaatactggatgaccttcaacgaaatcaacaaccagcgcaactggcgtgcgccgctgttcggctactgctgctctggtgtggtctataccgagcacgacaacccggaagagaccatgtaccaggtgctgcaccaccagttcgtggccagcgcgctggcggtgaaagccgcacgccgcattaacccggaaatgaaagtcggctgcatgctggcgatggtggcgctctatccatactcctgcaagccagaagatgtcatgttcgctcaggaatccatgcgcgagcgctacgtcttcaccgacgtgcagctgcgcggctactacccgtcttacgtgctgaacgagtgggagcgccgtggcttctccatcaaaatggaagcgggcgacgagcagatcctgcgtgaaggcacctgcgattacttaggtttcagctactacatgaccaacgcggtcaaagcggaaggcggtaccggtgacgccatttccggcttcgagggcagcgtgccgaacccacacgtcaaggcgtccgactggggctggcagattgatccggtaggcctgcgctattcgctgtgtgaactgtacgaacgttatcagaagccgctgtttatcgtggaaaatggtttcggcgcctacgacaccgtggaagaggacggcagcatcaacgatgactatcgcatcgactacctgcgcgcccacgtggaagagatgatgaaggcggtgacctgggatggcgtggatctgatgggctacacgccgtggggctgcatcgactgcgtctccttcaccaccggccagtacagtaagcgctacggctttatctacgtcaacaagcacgatgacggtaccggtgacatgtcccgctcccgtaagaagagtttcgagtggtataaaaccgtcattgacagcaacggcgaaacgctgtaatggctcgccctctctgcaagcggagagggcaaaccgcttatcttccagacacttctttacagcttttgcgttgccaaaatatgttcgcccgataatataggcgtcctgaatatttgaggcgaacatgatcaagcgacaacgcaacgctatcctgcttgtagccctggcctgcctggtggtgctgatatgcaccgcccagcggatggccgggatgcacgcgcttgtcatgaacgtcaccgccacgagccagtctgtccagcaggggcaggagagtaccgacgcaccggtaaccccgtgtgagcttagcgccaagtcgctgatgtcggtcccgcctgttttgtttgaaggcgccctgattgccgtcaccctgctgctggcgttgctggcagccagtccaccgcgccgcgaacggcagtggcctccccgcgttatctccccgccccggttaagggtgcatctgcgattatgcgtcttccgtgaatgagccttcgcctgttacttcaggttaattcattatttacggagaaaatttatgtttactgtattcaggcgactgctggtctgcctgctttggctatggctgcccctcagccaggctgccgacagcggctggctgcgcgccgccgataatcagcacgccagcgtcaggctgcgtgcgcaacccgaaagcactggcgaaacccgcctgctgctggacgtcgccctgcaaaaaggctggaaaacctactggcgctcgccgggtgaaggcggcgtcgcacccgcgattaaatggcatcagcccgtcgaggcgatctggcgctggcctgtgccgcagcgtttcgacgtcgcgggcatcaccacgcagggctaccacggcgatgtcagctttcccatcactctgcggggcgacgtcccgaagatcctgagcggcgtactgacgctctccacctgtagcaacgtctgtattcttaccgactacccgttttcgctgaacatgaccgcatccgcaggcgccggttttgattacgatttcagtcgggccatgggcacccttccgctcagcggcgggttgacctcaacgcttaacgccacctatgcccccggcaagctgaccgtaacggcgcagcttgacgcaggctggcaggcgccgtccctgtttatcgacggtatggatgatgttgatttcggcaaaccggccctcaccgtgcgcggtgactcgctggtcgccaccgtgcccgtgacggacagctggggcgaggccgcgcccaacctcagcggcaaaaccctgtcgctggttctggccgatagcgggcaggcgcaggagtccagcctgagcattcagccggggaacgccgcgccgacgctctcgttaggctgggtgctgctgatggcgctggcgggcggtctgatccttaacgtcatgccctgcgtactgcccgtgctggccatgaagctgggcacgctgatgcaaaccgaacggcaggcgcggagtcaggtacgccgacagtttcttgcgtcggtagccgggatcgtgatctcgttcctcgcgctggcgctgatgatgacggttttacgcttaggcaatcaggcgctcggctgggggatccagttccagaatccgtggtttattggcgcgatggcgctggtgatggtgcttttcagcgccagcctgctggggttgtttgaaatccgtctcccttccggcgccagcaccttcctcgccacgcgcggcggcaacgggcttgcgggtcatttctggcaaggcgcgtttgccacgctgctggcgacaccctgcaccgcgccgttcctgggtacggcggtctcggtcgcgctggcggcaccgcttcccctgctgtgggggatcttcctggcgatgggtatcggcatgagcctgccgtggctgctggtggcggcctggccggggctggcccagcggttgccgcgtccgggacgctggatgaacgtcgtacgcgtagtgctggggatgatgatgctcggctcatcgctgtggctgctgagcctgttgacggtgcacattggcagcctgcccgtcatcacgctgggcgtgttcctgatccttacgctgctgctggtcaccgcctggcgctaccgctggcaaannnnnnnnnnnnnnnnnnnnnnnnnnnnnnnnnnnnnnnnnnnnnnnnnnnnnnnnnnnnnnnnnnnnnnnnnnnnnnnnnnnnnnnnnnnnnnnnnnnnnnnnnnnnnnnnnnnnnnnnnnnnnnnnnnnnnnnnnnnnnnnnnnnnnnnnnnnnnnnnnnnnnnnnnnnnnnnnnnnnnnnnnnnnnnnnnnnnnnnnnnnnnnnnnnnnnnnnnnnnnnnnnnnnnnnnnnnnnnnnnnnnnnnnnnnnnnnnnnnnnnnnnnnnnnnnnnnnnnnnnnnnnnnnnnnnnnnnnnnnnnnnnnnnnnnnnnnnnnnnnnnnnnnnnnnnnnnnnnnnnnnnnnnnnnnnnnnnnnnnnnnnnnnnnnnnnnnnnnnnnnnnnnnnnnnnnnnnnnnnnnnnnnnnnnnnnnnnnnnnnnnnnnnnnnnnnnnnnnnnnnnnnnnnnnnnnnnnnnnnnnnnnnnnnnnnnnnnnnnnnnnnnnnnnnnnnnnnnnnnnnnnnnnnnnnnnnnnnnnnnnnnnnnnnnnnnnnnnnnnnnnnnnnnnnnnnnnnnnnnnnnnnnnnnnnnnnnnnnnnnnnnnnnnnnnnnnnnnnnnnnnnnnnnnnnnnnnnnnnnnnnnnnnnnnnnnnnnnnnnnnnnnnnnnnnnnnnnnnnnnnnnnnnnnnnnnnnnnnnnnnnnnnnnnnnnnnnnnnnnnnnnnnnnnnnnnnnnnnnnnnnnnnnnnnnnnnnnnnnnnnnnnnnnnnnnngatcttatcgccatgagtaaggagcgaccgctgctggtctacgtctgggcgacatggtgcggcgtctgccgctacaccacgccgtcggtggcggcgcttgccgcggacgggggtaacgtgatgtcggttgcgctgcgctcgggcgataacgcgacgctcgaaacctggatgaggaagaagaaggcgacgatgcccacggtcaacgacgccagcggagaactggcgcgtgagtgggacgttaaggttacgccaacgctggtggtgatctctcacggtgaagtgaagtcgatcaccaccggctggaccagcggctggggaatgcgcctgcggctgtggctggcgtcgtagcgttacttcccgccagccagctccaggaagctaccggtgacataggaggctttgtcgctcagcagccagacaatggcctgggcgacctcctccggctgaccgccacgctgcatcggtaacatcgacttcacccgatccacacgccccggctcgccgccggaggcgtgaatatcggtataaatcaggcctggccgcacgccgttaacgcgaatgccctgcgccgccacctccagcgcgaggccggtggtcagggaatccaccgccccttttgaggcggcataatccacatattcccccggcgcgcccagccgtgatgccgccgaggagacattcacaatcgcgccgcccttgccgccgtgtttatgcgacatgcgcttaaccgcttcacggcagcagagaaaatagccggtgacgttggtagccagcacgcggttaatacgttcagcggagaggttttcgatggtggattgttcaaacaaaatcccggcgttgttcaccagcgcggcgagcggctcaccttcgcgatcgatgctgtcgaacatcgccatcacctgcgcttcatcgctgatgtccgcgcgtacggcaaaggctttaccgcccgcgtccacgatctgattaatgacgtccgtcgcggctttgatgttgtgatgaaaattcaccgcaacggtgtagccttcgcttgccaactgtagcgcggtggctttaccaataccccggctggcgccggtgaccagtgcaattgccattcttttctcccaataaaaaagccgggtagcggcttcgccttacccggcctacgttactacaggaacaacgttactggtattcgctcatcggtacgcaggagcagaacaggttacggtcgccgtaaacatcatcaagacgtttcacggttggccagtatttgtttgccacacctgccgggaagacagccagctcgcgggtataaccgtggttccactctgccaccagttcgttctgtgtatgcggcgcgttcaccagcgggttatcttccagcgtccactccgcgcctttcacgcggtcgatttcgctgcggatcgccagcatggcgtcgataaagcgatccagctccaccttgctttcagattcggtcggctcaaccatcagcgtacccgctaccgggaacgacatggttggcgcgtggaagccgtagtcgatcagacgcttggcgatatccagctcgctgatgcccgtctcttctttcagaggacgaatatcgaggatgcattcgtgcgccacgcgaccgtcgcgaccggtatagagcaccggataggcgtccttcagacgcgttgcgatgtagttggcgttgaggatcgccacctggctggcctgcttcagcccttccgcgcccatcatgcggatgtacatccagctgattggcaggatagaggcgctgccgaacggtgccgcggagaccgcgccctgacgggtcagcatgccttcgatctgcaccacgctgtggcctgggacaaacggcgccaggtgcgccttcacgccgataggacccatgcccgggccgccaccgccgtgcggaatgcagaacgttttatgcaggttcaggtgcgacacatccgcgccaataaagcccggagaggtgatgcccacctgggcgttcatgtttgcgccgtcgaggtaaacctggccaccgaactgatgcaccacatcacacacttcacggatagtttcttcgtacacgccgtgggtggatgggtaggtcaccatgatgcaggagagtttgtcgcccgcctgctcggctttggcacgcaggtcggccagatcgatgttgccgtttttgtcgcacgccacaaccaccacttccattcctgccatctgggcagaagccgggttggtaccgtgggcagagcttgggatcaggcagatatcacggtggccttcattgcggctttcgtgatagtgacggatcgccagcagaccagcgtattcaccctgcgcaccggagttcggctgcatgcagagcgcgtcgtacccggtcagcttcaccagccagtcggagagctggttgatcatcatgtgataaccttccgcctgctcagccgggcagaacgggtgtagctcagagaattcaggccaggtaattgggatcatctcagccgcggcgttcagcttcatggtgcaggagcccagcgggatcatcgcctggttcagcgccagatctttacgttccagagagtgcatgtaacgcatcatctcggtttcgctgtgatagcggttgaacaccgggtgagtcaggatcgcgtcgtcgcgcagcatgctttcctgaatggagcggctgtcgagcgcaacctctttgtcgagcgtatcaacgtccagaccgtgtgcgtcacccagcaatacgttgaacagggtcaggatatcgtcacgggtggtgctttcgtccagcgtaatgccgaccgcattgtgaatgtcgctgcgcaggttgatttgcgctgcctcggcgcgcgccagcacggccgctttgtctgccacctcgacgcacagggtatcgaaatagtgttcatgacgcagtctgagacctttctgttgcagaccgcaggccaggatatcggccagacggtggatgcggctggcaatgcgcttcaggcctgccggaccgtggaacaccgcgtacaggctggcaatgttagccagcagtacctgcgaggtacagatattggagttcgctttctcgcggcggatatgctgctcgcgggtctgcatcgccatgcgcagcgcggtgttaccggcggcatctttcgatacgccgataatacggcctggcatggaacgtttaaattcatctttcgcgccaaagaacgccgcgtgcgggccgccgtagcccatcggcacgccgaaacgctgagctgagccgaagacaatatccgcgccctgtttgcctggcgccgtcagcagcaccagcgccataaaatcagcggcgacgctaacaataaccttacgggatttcagctcggcgatcagtgcgccgtagtcgtgcacttccccggtggtgcccacctgctgcaacagcacgccgaagacgtcctggtgatccagcactttttcagcgtcgtcgacaatcacctcaaagccgaaggtttccgcacgggtgcgcaccacgtccagcgtctggggatgcacgtccgccgccacgaagaagcggttggcgtttttcagcttgctcacgcgcttcgccatcgccatcgcttcggcggcggcggtcgcttcatccagcagcgaggcagaggcgatatccataccggtcagatccagcgtcacctgctggaagttcagcagcgcttccagacggccctgggagacttctggctgatacggggtgtaagcggtgtaccagcccgggttttccagcatgttacgcaggatcaccggcggtaactgcacgttggtgtagcccatgccaatgtaagacttatagcgcttgttaaggccggcgatggccttcagctccgccagcgcggcgaactccgtcgtggactcgcctacctgcggcggcgtagcaagctggatgtcttttggcacgatctggccgatcagtgcgtttaatgaatccgcgccaactgttttcagcatctcctgctgttgctgagcatccggcccaatgtgacgttcaatgaaggcgccacggttttcaagctggcttaaagtctgtgtcatgagcgatggttcctgaaacgtgcagtgaatttaagttccctctccctttgggagagggttagggtgaggggaagattggcnnnnnnnnnnnnnnnnnnnnnnnnnnnnnnnnnnnnnnnnnnnnnnnnnnnnnnnnnnnnnnnnnnnnnnnnnnnnnnnnnnnnnnnnnnnnnnnnnnnnnnnnnnnnnnnnnnnnnnnnnnnnnnnnnnnnnnnnnnnnnnnnnnnnnnnnnnnnnnnnnnnnnnnnnnnnnnnnnnnnnnnnnnnnnnnnnnnnnnnnnnnnnnnnnnnnnnnnnnnnnnnnnnnnnnnnngaagattggcaccctcacccctgccctctcccaaagggagagggggattactgattactcgtcttctaacagtgcttcgtacgcggtcgcatccagcagcgcggcaacctgcgcttcgtcgctggctttgatcttgaagatccagccgccttcatacggttcgctgttgaccagctccggggagtcgctcagcgcgtcgttcacggcaacaatttcaccgctcaccggggcgtagatgtcagaggccgctttaacggattccgccaccgcacagtcgtcgcctgcgctcacggttgcgcccacttccggcagatcaacaaacaccatgtcgcccagcagctcctgcgcgtgctcggtgatcccaacggtgtaagtgccgtccgcctctttgcgcagccactcgtgttctttgctgtatttcagttctgctggcacattgctcattgaagttctcctgataaaaatagttaggcgaccggcttaccggcgcgaacaaaaatcggtttggtcacgttgaccggcatttcgcggttgcggatctgcaccaccgccgtttcgccaatccccgccggcacgcgtgccagggcaatactgtagccgagcgtcggggagaacgttccgctggtgatcacgccttcgcgatgattgccatcggcatcggtgaagcgtacaggcagctcgccgcgcagaacgcctttttctttcatcaccaggccgaccagctgttcagtgcccttctcgcgctgcatctccagcgcttcacgaccaataaaatcacggtcagccggttcccacgcgatggtccagcccatgttggccgccagcggagagacgccttcgtccatctcctgaccgtagaggttcatccccgcttccagacgcagcgtatcgcgcgcgcccagacctgcaggcttcacgcccgcctccaccagcgcacgccagaaatcagcggccttctcgtttggcatggcaatttcgtagcccgcttcaccggtgtagccggtggtggcgataaacagatcccccgcctgcacgccgaagaatggcttcatgccttcggtggctttgcgctgctcgtcgctgaacagagaggcggctttcgcctgggcgtttggcccctgcaccgcaatcagcgacagatcgtcacggacggtgatgtcgatggcataaggttcggcgtgttgggtgatccaggagaggtctttttcgcgggtggcggagtttacaacgaggcggaagaaatcttcagtgaagtaatagacgataaggtcatcaatcacgccgcccgaggcattgagcatgccggtatagagcgctttgcccggcgtcttcagtttggcgacgtcatttgccagcagataacgcaaaaactcccgggtgcggctaccgcgcaggtcaacaatcgtcatatgagacacgtcgaacataccggcatcggtgcgcaccgcgtggtgctcatcaatctgcgagccgtagtgcagcggcatcatccagccgtggaagtccaccatgcgggcgccgcacaacacgtgctgttcgtacaaaggagtctgttgagccatcttttcctcgttgaaaaattcaccgtgaaacccggtgtcggcctcgcgatcgagggccgacgcaaacgttctcttttacctgaacttaccaccgaaaccggcggttaaccataaggtaaaacgggtcatcacattagcttatgaccaaaaatcgctgaaaagcctacagagttattcactgggaaaatgcgattaaacccgcataaaattaacaatgatctaacagggtttagcagatggtgatatttcatgcggaaaaacgggccgaatttccgtaacataaaaatagttagattagattttctaatgcgaaaaatgacgtgaaattagattatttcaaacgaggaaatttccccggcgcggaggccgggaaaataaagtgtgacggggatcgagattaacgtaaccagtcgggaagatcgttgaggcccattgcctgacgaagaagctgcggttttacgccgggaagggtgtcggccagcttgaggccaatatcgcgcagcagttttttcgccggattcgctccggcaaacagctcgcggaagccctgcatacccgccagcatcatcgccgcactgtgtttgcggctgcgctcgtagcgacgcagatacagatgctgaccaatatctttaccttcccgatgcaggcgacgcagctcttcaaccagctcagccgcgtccataaagccgaggttcaccccctgcccggccagcggatgaatggtatgcgccgcatcccccaccagcgccagacggtgcgcggcaaactgacgcgcgtagcgaccggttaacggaaacgtctggcgttcgctttcaagcatgcacaggcccagacggttatcaaacgccacgcatagcgcctgactgaaggcatccggcgtcgcctcctgcatctgctgcgctttctccggctctaaggaccagacgatggagcagagatgcggatcggcaagcggcaggaaggccagaatgccgtcattatggaaaatctggcgcgccacgccgccgtgcggctcttcggtgcggattgtggccaccaacgcgtgatggcggtaatcccagaaggtcagcggaatatccgctttgttacgcagccaggaattggcgccgtcggcacccaccaccagacgcgcggtcagcatgtcgccactttcaagagtgataaacgcgtcgttttcgccccacgccacctgctggagtttcgccggtgcgatcagcgtgacgtcgctgcactgctgtgctttctgccacagcgcgtggtggatcaccgcgttttcaacgatgtgtccaaggtggctgtaacccatgctttcatcgtcaaacgcgatatggccgaagctgtctttatcccacacttccatgccatggtaacagctggcacgcagcgccacgatttcagaccagacgccaaggtgcgtcagtagcttttcgctggcggcattgatcgccgagacgcgcagctccggcggtgcatcctgcgccacaggctgcggcgctttttgctcaagcacggccacgcgcaggccgctgccctgtaaaccacaggccagcgccagtcctaccattccgccgcccacaatggcgacatcaacattttgcacggtcaatactccttaacgcgcgacccaacccagggtccgctgcgccagcacgtcacgtgccggaatgaacagttccatcgccatcagcccaaggttgcgacccgcaaccagcggtgcccagcgattggcaaacaggtggactaaaccgtcggtgacgccaatggtcgccgctttgtccgcctggcgtcgtttctggtaatggctcagcactgagtatgcgccacaatcctgttgttcgctccacgtccgggccagtagctctgccaggcttatcacgtcacggaggccaaggttgaagccttgcccggcgatggggtgcagcgtctgcgcggcgttgccgaccagggcgacgcgatgggagacagtctgcgatgcggtcgtcagcgcgagcggataggccacgcgttttccggcatgggtgatgcgcccaagccgccagccgaaggctttttgcagctcggaacaaaaacgttcgtcggaccaggagagaacctcatcggcccgatcctgcgcatggcaccataccagcgaacagcgcccgttcgacatcggcagcatggctagcgggccgtgttccgtgaagcgctcaaatgccctgccgttatgcgcgccagccgtagagacgttagcgatgaccgccgcctgcccatagggttcagaacgccattcgacgccgcactgcgtggcgatcgcggagcgtgaaccatctgccgccaccagcagttgcccctccagcgtggtgccgttgtccagcgtcacgctgacggcctcgtcacggcgggtaaagctggcgacgcgcgccggacagtgcagcgtgacgccaggcgcgtcctgtaacagacggaacagccgcagccctacatcatgcagctcgacaacctgccccaacgcctcgatccgataatcgtgggcatccagcgtcacaaacccggcatgcccgcgatcgctgacgtgaacggtgccgatcgccgttgcgcaatccgctatcgcctgccagatcccaatacgcgcaagctgctgacaggtcccctgcgccagcgcgatagcgcgggcgtcgaaaccgggatgatcggccgcctgcggcgcgaccgcctcgacgagatgcaccggaagctggccctgggttaactgcgaaatagccagcgccagagtagcgccggtcatgcctccgccaacgatgattacgctcatccgcgtgccgccgccatcagcgcctcgatgtcgtcggcttttttcaccacggtcgcggtcaggttttcgttaccggtttccgtgatgacgatgtcatcttcaatacgaatgccgatcccgcggtactgttccggcacgtcggcatccggcgcgatgtacagccccggctcaacggtcagcaccatgccaggctccagcacgcgcgaacgttccggaccgtatgccccgacgtcatgcacatccagccccagccagtggctcaggccgtgcataaagtacggacgatgggcgttttcggttataagggtgtccacatcgcctttcagaatgccgagcttcaccagcccggtaatcatgatgcgtaccacctcgcccgtaacctcctgaatggaggtgccagggcggaacagcgtcagcgcggtctccagagactcaagcacgatgtcatagatttcacgctgcgcggaggtgaatttaccgttcaccgggaaggtacgggtgatgtcgcccgcgtaaccctgatattcacagccggcgtcaatcagcaccagatcgccgtcgcgcagttcactttcgttttcggtgtagtgcagaatgcagccattttccccgccgcctacgatggtgttataggacgggaagcgcgcgccgtgacggttaaattcatggtgaatttcgccttcaagctggtactcgaacataccgggacggcacttttccatggcgcgggtatgcgccagggcgctgatttcgcccgcgcggcgcatcacgttcagctcttcttcagacttgaacaggcgcatctcatgcaccatcggtcgccagtccgtcagggtggcgggtgcagacaaattctgacgtgagcctttacgcagcttatccagcgcggtgaaaacaatgtcatccgcatacgcgtattcgccctgggcgtgatagagcacgtccagaccgttcagcagttggtagagctgctggttgatttcgctgtaggccagcgcgcggtccacgcccagtttttctggcgccgcctcctgtcctaagcggcggccaaaccagatttccgcggtcagatcgcgcacgcggttaaaaatcacgctgtggttgtgggtgtcattgcttttaatcagcaccagtaccgcttccggctcgttaaacccggtgaagtaccagaaatcactgctctggcgataggggtattcgctgtcggcgctgcgcgtcacttccggcgcggcgaaaatcagggcagcgcttcccggctgcatttttgccagcagcgcctgacgacggcgagaatactcttgactggagataaccatgacaccctcctgtgcgttatttttcttagtgtaatgttggcttgcgaacttccggcgcggtcggctgcgagcgcgtaaagttgtcgtggcacagcagagacgccacgcgtacgtactcgataatctcttcgagagacatctccagctcttcctggtcttcgtcttcatcgtagccgagctgggcgatgttgcgcagatcgtcgatcgcttcacccgcttcgccggtcactttatccagtttaggctgggttacgcccaggccaagaagatagtggtttacccaacccgcgagcgcatcagcgcgatcgaagacgctgacatcgtcgccttcaggcagataaagctgaaaaagaaagccatcgtcttccagggaatcgctggttgcggcgtgcattttacgcagcgcttccgccagttcgtggccaaacgccagcccttcgttggtgaggtcgtggatcagcggctgccatgagctgtcgctgtttccgccgcacagtatgccgctgatcagaccgtgcatttcggcaggggtcagaccgactccctgctggttcagtaactggtttaaatccttgtaaccaggcatttcgttctgtatagacatacgcattcgtcatcaaagggaggatattcatgatatgctaccactttggaccctggtgataccagaaaagggcttgtatcttcacatcagggtagctatagtgtcgccccttcgcagcccccggggcagtatgcgaaggcagcgcagtcaatcagcaggaaggtggcatgtctgcacaacccgtcgatctccagatttttggccgttcactgcgagtgaattgtccgcctgaacaaagggatgccttgaatcaggctgcggacgatttgaatcagcggttgcaagatctaaaagaacgcactagagtcacaaatactgagcagctggttttcatcgccgcgttgaacatcagctatgaactgactcaggaaaaagcgaagacccgcgattacgcggcaagcatggagcagcgcattaaaatgctccagcagaccatagaacaggcattgcttgatcaaggtcgcagtcccgaaagaccgggaccaaagtttgaataacacttctcagttgactatggtagagtaactgtgaagacaaaatttctctgagatgttcgcaagcgggccagtcccctgagccgatatttcataccacaagaatgtggcgctccatggttggtgagcatgctcggttcgtccgagaagccttaaaactatgacgacacattcaccttgaaccaagggttcaagggttacagcctgcggcggcatctcggagattccctctcttttcttctaccgactaccatgactcaactccctgaagtttctgcttcacgccaggacatccgtcagcttattcgccagcgtcgtcgcgccctaagcgccgagcaacaggcacagtttgctcagcaggccgccgcccgcatgatggcctatccccctgtggtgatggcaaacaccgtcgccctgtttatctcgtttgatggtgagctggatacccaaccgcttatcgaccagctctggcgcgccgggaaaaaagtttacctgccggttctgcatccctttagcccgggcaatctgctgtttctgcactaccatccgcacagcgagctggtggtgaatcgtctgaaaatcaccgaacccaaactcgacgtgcgcgacgtgctcccgctttccgggctggatgtgctgattacgccgctggtggcgtttgacgagcagggccagcgattaggcatgggcggggggttctacgacaggacgctgcaaaactggcagcagtacgggttgcagccggtgggctatgcgcatgattgtcagggcgtggaggcattacctgtagagaaatgggatgtgccgttaccagcggtggtgacgcccagtaaaacctggacctggtagaacaaagccgggtggcggctacgccttacccggcctacataattcctcgaacattgtaggttgggtaagcgtaagcgccacccgacacacaaaccgcacgacaactgtaggtcgggtaaggcgcagccgccacccgacaccacagaccgcaccatcagtacaacaggcgcgcgcgaatcgtccccggaatggccttcatgctctgcaatgctttctcggcgatgtcttcatccgcttcgatatcaatgaccacataacccatctgcgagttagtttgcagatactgcgcggcaatgttaacgccctgctcggcaaagatctggttgatggcggtcagcacgccaggacggttttcgtggatatgcaggagacgacgcccaccgtgcagcggcagagacacctccgggaagttcaccgcagagagcgttgaaccgttgtcggaatatttgctcagtttacccgccacttccaggccgatattctcctgcgcttcctgagtagaaccgccgatgtgcggcgtcaggatcacgttgtcgaactcgcacagcggagaggtgaacggatcgctgttggtggccggttccgtcgggaatacgtcaatcgccgcacccgccagatgcttacgcttcagcgcgtcgcacagcgcaggaatgtcaaccacagtgccgcgcgcggcgttgatcagcagagcgcccggcttcatcagcgccagctcttccgcccccatcatgtttttggtggacgcattttccggcacgtgcagactgaccacgtcactcatattcagcagatcagagagatgctgcacctgcgtcgcgttacccagcggcagcttgctttcgatatcgtagaaaaacacgtgcatgccgagggattccgccaaaataccgagctgcgtaccgatgtggccgtaaccgataatcccgagctttttaccacgcgcttcgtaggagcccgcagccagcttattccacacgccgcggtgcgctttggcgttagcttccggaatgccgcgaaggagcagcagcagctcgccaatcaccagctccgccacggaacgggtgttagagaacggcgcgttaaagaccgggataccgcgtttggcggcggcattcagatcaacctggttggtgccgatgcagaaacagccaatcgccaccagcttttccgccgcagcaataacgtcttcagtcagttgggtacgggatcgcaggccaatgaaatgggcatcacggatggacgctttcagctcttcagtgtccagcgcgcctttgtgaaattcgatgttggtgtagcctgctgcgcgaaggctatcgagcgctttctggtgcacgccttcaaccagcaggaatttaatcttgtctttctccagtgatacctttgccatttacccgaccctgtttttatctgaactgatgttgtgctggatataaatcccgtgcagccaacatatcaaaaaaaactattgcagcaatatgaacgtttgcgtcggcactctgaagaaaagtcatacagagcaaaatggcagaggaaaatgctgcggaaaattacgaacgtggcaggatcggcaaaagaggcggaaaaacgtgacacaagtcaccgaatttagcttttcaaaaattttttagcggggggagcgctccccccttcagatcattttacgatggtttttacaccgtcagccgtgccgatcagcgccacgtccgcgccacggttggcaaataaccctacggtaacgacgcctggaatgccgttgatcgcattttccagcgcaatggcatcgaggatctcaaggccgtgaacgtcgaggatcacgttgccgttgtcggtcaccacaccctgacggtattccggacgaccacccagcttcaccagttgacgtgccacggcgctgcgcgccatcgggatcacttcgaccggcagcgggaaattccccagaatgtcgacctgcttggaggcgtccgcgatgcagatgaacttatccgcaacggaggcaatgatcttctcgcgcgtcagcgccgcgccgccgcctttgatcatctgcatatggccgttgatttcatccgcgccatcaacgtaaatgcccagacggtccacttcgttgaggtcgaaaacggtgatgccgaggcttttcagcttttccgtggaagcatcggagctggaaaccgcgccctcgatctgccccttcatcgtgcccagcgcatcgataaagtgcgccgccgtcgaccccgtaccaacaccgacaatggtacccggctgtacgtactggagagcggcccatcctactgcttttttcagttcatcctgcgtcatgatcgttttgcctgtggtgtgaaaactcagggcgcattatagaacacgtcgaatggatttcgtctgccacgaagggaaaattgtgtcatagtgcagattaagcaaaattaaggagtcagccagagcaatgaaacgtccggactacagaacactacaggcacttgatgcagttattcgtgaacgcggttttgagcgcgcggcgcaaaagctgtgcatcacccagtccgccgtatcacagcgtatcaaacagcttgaaaacatgttcgggcagccgctgctggtgcgtaccgtaccgccgcgtccgacggagcaaggacaaaagctcctcgccctgctgcggcaggttgaactgctggaagatgaatggctgggcgatgaacagaccggctccacgccgctgctgctgtcgctggcggtgaacgccgacagtctggcgacctggctgctgccggcccttgcgccggtgctggccgactcccctatccgcctgaatctccaggttgaagacgaaacccgcacccaggagcgcctgcgtcgcggcgaagtggttggtgcggtcagtattcagcctcaggcgttgccaagctgtctggtggatcagctgggcgcgctggattacctgtttgtcggttcaaaagcttttgccgagcgctacttcccgaacggtgtgacccgcgccgcgctgctgaaagcgcctgccgtcgctttcgaccatctggacgatatgcatcaggctttcctgcaacaaaacttcgatctgccgccgggcagcgtaccgtgtcatatcgttaactcgtccgaagccttcgtacagctcgcgcgtcagggaaccacctgctgcatgatcccgcatttgcagattgagaaagagttgaaaagcggtgagctgattgatttaaccccggggctgtatcagcgccggatgctgtactggcaccgttttgcgccggaaagccgcatgatgcgcaacgtcactgacgcgctgctggcgtttgggcataaggtgttaagacaggattgaaaaactagccgggtggcggcttcgccttacccggcctacgggttactgagcgggcttttcagtcggctccagctggaacaccacatcaacctgatcgtcgaactgaatggttggctgctcataggtttcctgagcagaaaccggcgcggcgtccgccttcatcatccgaaccatcgggcttggctggtagtttgaaacgtggtagcgcacgctgtaaaccggaccgagcttggtcttgaagccggatgccagctgctgcgcctgatgaatggcatcatcaatcgccgctttacgcgcttcgtctttatatttctccggttgcgcaacgcccagcgagacggaacgaatttcgttcagcccagccttcagcgcaccatccagcaatccgttgagcttatcaagctggcgtacagtcacttccacagtacgcacggcgcgatagcctttcaggatgcttttgccgttctggtagtcgtaatccggttgggtacgcaggttcgcagagctgatgtcttttttcgcgacaccgttctgttccaggaaagagaggtattgcgcaacacgatcgtctgcctgtttcttggcggaagcagcatctttcgccgccacgttcacttcaattgccagggttgcaacatccggtaccgcatccacgcttgccgtgcctgaagtgacaatgtgcgggccgtttggcagttcattcgcctgcaccgacaccgcacctaaacttactaatgccgccagggccatcaccttaaacttcactgtcattcctccatgttgcgaagagtgccccatcaacagggctcatgccagcaagcttagcgggtcttgttcagatgtccataagacaacgcttagttgaacaatccctgtacgtgatgaatgccctctttcgccagctggaaggcaataaaccacatcaccagcccaaccagggtattgatagtgcgctgcgctttagcggtgcgaagacgtggcgccagccatgccgccaggatcgcaagaccaaagaaccagaggaaggaggcgctgaccgtaccgagcgcaaaccagcgcttgggctcaacgtccagctgtccacccaggctgccgagcaccacaaaggtatcaaggtagacgtgcgggttaagccacgtcacggcgagcatggtgacgataatcttccagcgcccttgcttcatcacttcggcgctcgccagctcaagattgctgctcatggccgttttcagggcgccaaacccgtaccacagcagaaacgctacgccgccccaggtaaccagcgccagcagccacggcgactgcatcagcaaggcgctgccgccaaaaatcccggcgcaaatcagtagcaaatcgctcaccgcgcacagcagggcaatcatcagatgatactggcggcgaatgccctggttcatcacaaacgcattttgtggaccaaggggaaggatcatggccgcgcctaacgcaagcccctgaaaataataagataacatgacgtaattctcgcagagttgtcctggaggcagactatactgcgggaacgacattagaggaaattgataatattaattggagattagccgggctaatataagaaaagcccggtgtcgctgacgcttaccgggcctacgttaaagcaaattattcggctgctttctcgcgtttgagatttacgtccatctgcggataagggaagctgataccgttggcatcgaaatcacgcttgatgcgctccagcacgtcccagtaaacgttttgcagatcgccgcttttactccagatgcgcaccacaaaattaatggatgacgcgcccagctcgttcaggcgaacggtcatttcgcgatctttaagaatgcggtcatctgattcgatgatatcggtaatcagctttttcaccagctcagtatctgaatcatagccaaccccgataatgagttcattacggcgaaccggctcacgagagaagttagtaatgttgccatcaatcactttcttgtttggcacaatgacgattttgccgtctgccgaacgcagcgtggtagaaaaaatctgcacgttcagcacggtgcccgcagtgccaccgagatcaacatactctccggcacggaaaggacggaacgtcactaacagtacgccagctgcaaggttagccagcgagccctgaagagcgagacctacggccagaccagcggcaccaagtacggcaatgaccgaagcggtctgtacaccgacccgccccattgccgcaatgagggtaaacgcaataatcccgtaacgcaccagcgcagataggaaatcagcaacggttgcatcgatatgacgggatagcattacgcgattaacgccccgggaaaccgtgcgggcaacgatcatccccacaataataatggcgattgccgccgcaatattcacagcgtaactaatcaggagcgcctggttgcgcaccagccaggagccagcgttattgatgctatctacaacaccgagatcttccatttatctttccttatgctcataaaaaccacaaaatctatcccacacggagacaggcaggtcagtaaagggtaaacaaaaagccatgatattgccaaacagatcacaaaaacagaggcatcaggctattgaaaaggcataaaaaaaggcccgcatatgcggaccttcttgacgctatgaacagctcaaattacagaacgtcaaccgcgttcagttctttgaatgcctgctccagacgagtaatcatagaagtctgggcagcgcgcagccatacgcgtggatcgtagtatttcttgttcggctggtcttcgcctttcgggttgcccagctgaccttgcaggtaagcttcgttggttttgtagtattgcaggataccgtcccaggttgcccattgggtgtcggtatcgatgttcattttcactacgccgtagcttacggaatctttgatttcctgagcagaagaaccggaaccgccgtggaagacgaagttcaggctgttgtgcggcaggttgtgtttcttagacacgtattcctgagaatcacgcaggatggtcggggtcagaaccacgttannnnnnnnnnnnnnnnnnnnnnnnnnnnnnnnnnnnnnnnnnnnnnnnnnnnnnnnnnnnnnnnnnnnnnnnnnnnnnnnnnnnnnnnnnnnnnnnnnnnnnnnnnnnnnnnnnnnnnnnnnnnnnnnnnnnnnnnnnnnnnnnnnnnnnnnnnnnnnnnnnnnnnnnnnnnnnnnnnnnnnnnnnnnnnnnnnnnnnnnnnnnnnnnnnnnnnnnnnnnnnnnnnnnnnnnnnnnnnnnnnnnnnnnnnnnnnnnnnnnnnnnnnnnnnnnnnnnnnnnnnnnnnnnnnnnnnnnnnnnnnnnnnnnnnnnnnnnnnnnnnnnnnnnnnnnnnnnnnnnnnnnnnnnnnnnnnnnnnnnnnnnnnnnnnnnnnnnnnnnnnnnnnnnnnnnnnnnnnnnnnnnnnnnnnnncgtgtacgtacaggacgctgcgatggtgaagcgtgggctgattttgctcagctcggtgtaagcgtaatcaacgtcttctggctgagtgtacagagcagaagcgtccatgtggctgttgtccacaccgtcttcttcaccgccggtgcaacccagttcgatttccagggtcatgcccattttggacatacgcgccaggtacttagagcagatctcgatgttttcttccagagactcttcggacaggtcgatcatgtgagaagagaacagtggcttaccggttgctgcgaagtgtttttcacctgcgtccagcagaccgtcgatccatggcagcagttttttcgcgcagtggtcagtgtgcaggataaccggaacaccgtagtgctcagccatctggtgaacgtgatgtgcgccagagatagcacccaggatagcagcgccctgaggaacgtcagttttcacgcctttacctgcgatgaacgcagcgccgccgttagagaactgaacgataaccggtgctttaacttttgcagcggtttccagtacggcgttgatggagtcggtacctacgcagttaactgctggcagagcgaagttgttttctttagctacctggaacactttctgtacgtcatcaccagtgataacgccaggttttacgaaatcaaaaattttagacatgttgcttagtcctgtatcttcggccgttagaaaaggtgcgagctctgataagcgcgctgaaaattgggcaggtttccctgcccctgaatggcttacttcttagcgcgctcttcgagcattgctactgctggcaggactttaccttccacgaattcgaggaatgcgccgccaccagtggagatgtaggagatcttgtcagcgataccgaacagatcgatagctgccagggtgtcaccaccgcctgcgatagagaacgcttcgctgtctgcgatagcgttagccacgatctcagtccctttgcggaagttcgggaattcgaacacgccgacaggaccgttccacaggatagtttttgcgtttttcaggatttcagccagtttctgtgcagaaacgtcgcccaggtccagaatctgctcttcatctttgatgtcgttaacagatttcagggttgcggtagcggtttcggagaactcggtagctacacgaacgtcagttggaaccgggatatcacaggtgctcagcagacgtttggcttcgtcaaccagatccgcttcgtacagggatttacccacgttgtggccttgcgcagcaacgaaggtattcgcgataccaccaccaacgatcagctggtcagcgattttggacagggaatccagtacggtcagtttggtagaaactttagaaccaccaacgatagcgaccattggacgagcaggttctttcagagctttacccagcgcttccagttcgtcagccagcagcggacctgcacaggcgacgtctgcgaatttaccgataccgtgggtagatgcctgcgcacggtgagccgtaccgaatgcatccatcacgaatacgtcgcacagcgcagcgtattttttggacagggtttcgtcgtctttcttttcgcctttgttgaagcgaacgttttccagaacaaccagctcaccttcggcaacttccacgccgtccaggtaatctttcaccaggcgaaccgggctggacagtttgtctttcaggtaattaacaaccggcagcagagagaactcttcgttgtactcgccttcagttggacggcccaggtgggaggtgaccatcactttagcgccctgcttcagagccagttcaatggttggcagagatgcacggatacgcgcgtcgctggtcactttgccatctttaaccggtacgttcagatcggcacggatgaaaacgcgtttacctgccagatccagatcggtcatcttaattacagacatggtgaatcctctcgttgattcttaaagttttgcaagcgcaaggtgcgctctacctgaaaccttttgcggccatggctaacgtggtgtcgagcattcggttagcaaagccccattcgttatcacaccagaccagcgtcttgataaggtgcgcaccactgactcgcgtctgcgtgccatccacgatggcgctgtgcgggtcgtggttaaaatctactgagaccaacggtaattccgtatagtcaactataccatgaaatgctccctgtgccgctttttgcagcaacaggttgacttcacaggcttttaccggttttttcaccgtcacgctaagatcgattgcggtgacgtttatcgtcggcacgcgcacggcaatcgcttcgaaacggtcgttaaactgcgggaaaatacgggtgatcccggcagccagtttcgtatccaccggaatgatggactggctcgccgcgcgagtgcgccgtaaatccggatggtaggcgtcgatgacctgctgatcgtgcatggcggagtgaatcgtggtcacggtgccggattcaatgccatacgcatcgtctaacagtttaatgaccggaataatgcagttggtggtgcaggaggcgttggagacaatgcggtgttcagcttgcagctcgtgctggttgacgccaaacacgacggtggcgtcgaggtcgttactgccgggatgggagaacagcacttttttcgcgccagcattcagatgcgcttcgccatgttcacggttaccgtacacgccggtacagtccagcaccacatccacacccagttcgcgccagggcagcccttcaatactgttctcatgcagcacgcggatggcatcgtcaccgacgaacagctgttccctttcctggcgaacgtcccaggcaaagcgaccgtggctggtgtcatatttcaacaaatgcgccatgcccgcagcatccgccagttcattgattgccaccacggtgatttccgcacgacgcccggattcatataaagcacgaaccacgttgcgcccgatgcgaccgaagccattaatcgctacgcgtacggtcatagatctcctgcaaagctatccctgagtttgaggtggctgaaagagtaatccagcgacgcccgaaggggaatccttgctgtcacaaactgcgattgattggtcaattgtcgaacatttaatcgactgaaacgcttcagcaagaataagcgaatcggggaataaaaggaatctctgtctagattaagagcgattttatctgatctccatcacatttttccggaataatcccttttcctcccgccacgtaaaaacgcggcgggtcgaccggagcccctactgaaagccgctgaggatcagacgagtcggtattcgccatttgccgacatcatcagttcaacattggcaggacggctgtgacgcaaaacacgctccacgtttggcccgtcggtgcgcgcataaaacgcgtcggcgtcggcctgagagagtccgccggccagcttacgtccaaccaggcgcgtacgtaaggcttcggcgggggcgcgaataaacaatgaaaaatcacagtattccatcagcgttcgccatcgttcgtcatcaagcagcagccagttaccctcaacaatcacgacaggggccgttaccacgattgcatcttcgacagggtcgtgcgtttgccggtcatactgcggccaggtaccgtcgccctcttttatctgccgcagatgttgcgccagcctgtcgacatcaaaggtctccggggcgcctttgtacgcgcgcaggttatgcgcttccagccagacgttgtagtgatgaaatccatccatcggcaacgtctgaatcggagcgagcccctccatctgacgagagaggaattcccagaaggcggtcagcgtggacttgcccgtaccgggcggggcgctgagaaaaacaatcgtacgtctgctggcgctggcgaaatgccgtttcgccagttgccgcagcaaaggcttatgaacattttcaatttcgtcgtcaggataatgtgcttctacatatagcccattgaccgttagcccaattttcacggcgtaagttcctttaaaattgtcgttaccgccagggtgagcgccgtcttgatcattgcggtaaagcgcacctcagaccatgcggcaaagtcagcaaatttcatcgactccagcgcgctaaataacgtcgcgttacgggtgatgcaattaacgttgctgataaaatcccaggtgatgtcatcggcgaagccagggatcgtatcctgctcgttcagatactgataaaactgcgaaaaatgcgttatgtcggcgtagagccatttttccattttccccagcgcatagatcaggcgtaacgccacatcgatgtcatcaagcggcccactccgggcgagtaacggcttcactgcatattccacgatctcttcatcgttatcgacaaacagcgacggcagaaaacatttaatgccctggagtaaaaaagactgtgccgtcgtcataaatgcgaggaggttattctgagcatccagttgctcaagcacatcgtcttctgtcagtgtcgtcatttgtatctcgataaatcaccgtgaatgcagagagtctattatattacacgttcgatctgcgccgccgatcagtaaagtttgcgtgcgcacacccttcgcaacctgttgaatacctttaaccagttcgccgcccgtcacgcccgtcgcgctgaacagaatgtcattgccctttaccagttcgctaagggtatagatacgattgacttccaccttcatctccgcacagcgacggtgctcctgcacggcgaccctacggttctcaggactctcccctttcgcttcacaaaaatcgatcagctccgcctgcatatcgccacccagcgctttcaccgcgcaggcggagatcaccccttccggcgcgccgcctgtggtgtacatcagatcatagggattatcctgtaagcaggtcagaacgctggcggcgacgtcgccatcgggcagcgcaaacactttcacgcccagttgcgtcgcctcggcaattgcattttgcaggcgcggtttgtccagcgtcaccatccgcagatgctccagcggcttgcccagcgcccgggcaacgttgcgaaggttttctgccagcgggagatcgaggctgattgccccggctgccgctgcgttaaccaccagtttttttcatgtacatatcaggggcatgaaacaggcggccctcaggcgcaaacgccatcacagccagcgcattgctttgccccatcgccaccatgcgggtgccctcgatgggatcgacggcaatatccaccgccgggccgatgccgcttccgacctcctcgccaatccacagcattggcgcatggtcgatctcaccttcgccgataacgatacgcccgcgcatcgctatcgcgtttagcgcctcgcgcatggcggttaccgccagcccgtcgattcggtttttatcgccgcacccggtttgcggccaggcggccaacgccgcctgttccgtaacgcgaaagagcggccatgccagagacatcatgccgccgcctccccaatatccacaccaaactgcgccagcagatagcgctctgctttttcattccagatgccgtgcgtctcttccacaagccttgccagctcccggaaaagcggatcggttttgcccttttcggcaaaatcggcaatggccgttaacggcatggtgacaccgttatagataagcttcttgcctccagaaatgtccggaagattgagtaccgtatgcggcaccgcatcaaggccgccgatgtgggtcaccataaacgacggctggagctggcccgtcgcactcagcgcaatcgcctctttcatgtcctccgtcgagccgccggaggtgcccaccacgtgggtactgttgtaatggacgttgtaaaaattaaacggcaccttgaaattgctgtccgttggtccggcgaagaaattcaggcacccgtcctcggcgagaagatcgtctgccagttcaatgaccgccggaaccgcggcatagacaaacacgtcgtcaaagcctgcattgtcagttaatgcgcgtaacgtagcggcagggttctccagttcggaggtattgacatagataagctcaatacccttttgtgccgccagctcaaccggcaggagtttttccgcctgcgcaagacgagcctcatcgatatccaccaccacaacgcgcgacggctgaatcccgccgttaatcgcataatcaatagcgccaattcccatcggcccggcgcaggccagaagcgcaatattacctcccggtttcacacccatccggtgctcatagacatattgcgtcgtatgataattggcgttatacgcgccgataatgcagcacatgggttccgccagcgaagccgccgcaaaataggagccgtgataaggtaaaacgcagcccagattaatcgcaacttctggaataatcatatacgtcgcattgccgccaaaatattcatagctgtagccagcagaataaccggtcggtaatcccattgccggttgtaaaacaaagcgctgaccttttttatatttttcggtcagatttttcccgacctcaacaatcaccccggcgcattcatgtccggtgatgaccggatgattttccagatcgtccggcacacgtttatgttcactgcctaatttcgctgccttccaggttgataaacaaacgctgtcagaaattacgctcaccagcagttcattgtcgcttatttcgggcagttcaaattcacggatacgaacatcctgcttgccataaatggcagccactttcgttttcataatgactccagaaaccagatagattaattcgccgttaaatgcttaaagagatcgtcaagctgcggatcgccgagatagttttttatcagcactaacggtttgtcactgacccgtttagcacgcccctccaggctggcatgggtaacaataatgtccgcatcgtcaggcacattttcgatggcgtaatgttttacgtcgatatctcgcccggccttttccagacgcttgcggaatgtcgtcgcgcccatagcgctggagcccattccggcatcgcagacaaaagcgatatgcttaatatcctggtaagaaaacttgccttcctgcttcatggcttttacggcgttggcagaatcattgaaagtatcttccgtttcagcttcgctatttttattcatattcaggataaaagaggcgactgcaaaggtgaccagcgtgcctgccgttacgccagcaatcgttgcgagaaaagcacccttaggtgttaacgcgagataggcgaaaatcgaacccggacttgggccagctaccagaccaccgcccaacatattaaatatccacgttccgctcatgccgccagcaatcatcgcaatcagcgtcagcggtttcatcagtacgtaagggaaatagagctcatgaatgccgcccaggaagtgaataatcatcgcgccaggggctgatttctttgccatccctttgccaaaaaaagtaaaagccagcagcagacctannnnnnnnnnnnnnnnnnnnnnnnnnnnnnnnnnnnnnnnnnnnnnnnnnnnnnnnnnnnnnnnnnnnnnnnnnnnnnnnnnnnnnnnnnnnnnnnnnnnnnnnnnnnnnnnnnnnnnnnnnnnnnnnnnnnnnnnnnnnnnnnnnnnnnnnnnnnnnnnnnnnnnnnnnnnnnnnnnnnnnnnnnnnnnnnnnnnnnnnnnnnnnnnnnnnnnnnnnnnnnnnnnnnnnnnnnnnnnnnnnnnnnnnnnnnnnnnnnnnnnnnnnnnnnnnnnnnnnnnnnnnnnnnnnnnnnnnnnnnnnnnnnnnnnnnnnnnnnnnnnnnnnnnnnnnnnnnnnnnnnnnnnnnnnnnnnnnnnnnnnnnnnnnnnnnnnnnnnnnnnnnnnnnnnnnnnnnnnnnnnncacttccttcgacaaaaaagtaaagccagcagcagacctaatcccggccggggttggaggccaccataaagaagatggatttacccgtttcggaagcctgctgcattcccagcggataataaacaccctgatcgatagcgttatttaaaaacaggatttttgccggttcgttaatcagcgacagcagcggcaaatagcccgcatgcaccagtgcttcaatacattctttgataaagttattggcaattaacaccgcagggccgatcacttcaaatcccagcaggcagaggagcatgcccgcaatacccagcgagaagttgttgatgaccatctcaaaaccagcgggaatgcgtttatccagcagccgatcgatgtgcttaatcaccagaccgccaagtggccccatgatcattgagccgaggaacataggaatatccgcgccgataatcacgccgatagtgccgatcccccccatcaccgccccacgtttgccgccaaccaggtgtccaccggtagagccaatcatcaccggcaataaataggtgatcatcggaccgacaattttggcaaaatgctcatttggcatccagccggttggaataaataatgcggtaataaatccccaggcaataaaagcgccaatattcgggatgaccattgcagtcaaaaagcccccaaaagcctggacctttgcacgagcagacttgtgttccataataatgtcctgtaaaggagagaataattatgcgcgagcgataatatccgccaactgcttttctgacttagcggttaacaacgccgacagtttatcttcttcacataataattcgcttaatgcctggatagcgccgatatgtgaatccgcatccgccgccgataaaccaatgagtaatttcacgggctcatcgtcgtcggcaaactgcacttcctgtttaagaagcgttaatgacatacctgtttttaaggcaccgcactccggacgggcatgaggcatcgctacacccggagcgagaatgtaataaggaccattagtgagcgtcgaggttttaattgcttcaatataaccagcgttaatataatgattttgcagcaaagacgacatggacaaatcaatggcttcctgccagtcctttgctgcggattttattgatattgaggattcagggaaataatcaattaaccgcatatatcatccttattttatttttagggtacaacgtatcgctaaaaacaaaatacgcctgcggtaaaatgaaatcaaacggggagaaaatggcgagcgtgtcagaacgcattttaataaaacgaatgaaaacatatcgttaaaaacaagaaataaaaaagcaagtctatatatgtgatatccattgcaaattacacatattatgactttacgcatttgtgacgggaatcaccaaatatatgttgttaacacaaaaaaaataccatcgaaataaaaacgggccgccttagcgacccgttttgcctcactgggagagttacagcagttctttcgccttagcgacaacgttctcaacggtgaagccaaactcttcaaacagctgttcagccggcgcagactctccaaacgtggtcataccgacgatagcaccgttcaggcccacgtatttgtaccagtagtcagcaatacccgcctccaccgccacgcgagcggagaccgctttaggcagtacggattcgcggtacgcggcatcctgcttgtcgaacgcatcggtagacggcatggagactacgcgcgctttcacgccttcagcagtcagtttttcccatgcggcaacggccagttcaacttcagaaccggtcgcgatgaagatcagctcaggctggcctgcgcaatctttcagcacgtaaccaccgcgcgcgatgtttgccagctgctctggggtacgctcctgctgcgccaggttctgacgggagaggatcagtgcggtcgggccatcatgacgctcaacgccgtatttccacgccaccgcagattcaacctggtcacatggacgccatgtgctcatgttcggggtcacgcgcagagaagccacctgctctactggctggtgggtaggaccgtcttcgcccagaccgatggagtcgtgggtgtagaccatcacctgacgctgtttcatcagcgcagccatacgcacggcgttacgtgcatattccacaaacatcaggaaggtagaggtgtacggcaggaaaccaccgtgcagagcgataccgttggcaatcgcggtcatcccgaattcacgtacaccgtaatggatgtagttaccggcagtatcttcgttgattggcttagatccggaccacagggtcaggtttgatggcgccaggtcagcggaaccgccgaggaattctggaagcagagggccaaacgcttcgatcgcattctgagatgctttacggctggcgatcttggctgggttcgcctgcaacttcgcgatgaactcgttcgctttcgcgtcgaagtcagacggcatgtcgcctttcatacgacgggtgaattcagccgcttcctgagggaaggctttcgcgtatgccgcgaacttctcgttccaggccgcttctttcgcctggcccacttctttcgcatcccactgagcgtagatttcagacgggatttcgaaggcagggtgtttccagccaagcgcttcacgggtcagtgcaatttccgcgtcgcccagcggtgcgccgtgggagtcgtgagtgcccgctttgttcggagaaccgaagccgatgatggttttgcacatcagcagggacggtttgtcggtcacggcgcgcgcttcttctacggcacgtttaatcgagtcagcatcgtggccatcaacgccgcgcacaacgtgccagccgtaagcttcgaaacgtgcggcggtgtcgtcagtgaaccagccttcaacatgaccgtcgatggagatgccgttgtcgtcgtagaacgcaaccagtttacccagcttcagggtgcctgccagggagcacacttcgtgagaaatgccttccatcatgcagccgtcgcccaggaaggcgtaggtgaagtggtcaacgatgtcgtggccaggacggttaaactgcgccgccagggtcttctctgcaatcgccatccctacggcgttagcgatgccctgacctagcggaccggtagtggtttcaacgccagcggtgtagcccacttccgggtgacctggagttttggagtgcagctgacggaagtttttcagctcttcgattggcagatcgtagccagtgaggtgcagcaggctgtagatcagcatagagccgtggccgttagacagcacgaaacggtcgcggtctgcccatgccgggttctgcgggttgtggttaaggaaatcacgccacaggacttcggcgatgtcagccatgcccataggggcgcccgggtggccggatttggctttctgtactgcgtccatgctcagcgcacgaatagcattagcaagctctttacgtgaggacattttaactccagatcggactgttaaaggccatgcccttgacgacagcgcgttttgggctacgccggaaaaaagtgccaacaatgtaacccaagccgcagggcatgtacatggaccattcttttgcagcttaagaaatctctggatcatgctcgcatgttgcgcaatctgctcgcccgcctctgtcgatattccttatacttagcccgacaccggcttcgttgacggtgcatttttcggaattaattcagattaacgagtacggaagcaacatcatgaaaatgcgtgcaatcgggctggctgtgggaacaacgctcctgctaagcggctgtcagaatatggattctaacggcctgatgacctcaggcgcagaagcttttcaggcctactcattgagcgatgcgcaggtgaaagcgttgagcgacgaggcctgtaaggatatggatggaaaagctacgcttgccccggcaaacagcacctacacgcagcgtctgaacaagattgcttccgcgctgggcgacaacattaacggtcagccggtgaactacaaggtgtatatggcgaaagacgtcaacgcctttgcgatggcgaacggctgtatccgcgtttacagcggcctgatggacatgatgaccgacaacgaagtggaagcggtgatcggccatgaaatgggtcacgttgcactgggtcacgtgaagaaagggatgcaggttgcgctgggcaccaatgccgtgcgcgcagcggcggcctctgcgggcggcatcgtcggcagcctgtcccagtcgcagctgggcgacgtgggcgaaaaactggtgaactcgcagttctcccagcgtcaggagtcggaagcggatgactactcttacgatctgttgcgcaaacgcggcatcaatccatcgggtttagctaccagcttcgaaaaactggcgaaactggaggagggccgtcaaagctccatgtttgacgatcacccggcttcggaagagcgtgcgcagcatattcgcgaccgtatggcggcagacggaattaaataatttcagaaggaggcagttttgcctcctttttatttcgcatgaattgttaacttaaaagcacgtatcgataacacccctgaaagccccgccaaatctaccctgccactctgaaatgtctggtcacataattattgcaaaggttactttttccggtaattatctcttccgcagttattcaaattaatatatccagacagagacgttccctccgtgaaaaaagaattatcattaattgctttaagtttatttgccgcattacctgccgccgcaagccagcaatccgacagcaagggttttattgacgacagccatctggatctgtttttacgcaatgcgtatatcagccgcgactaccatcagggccagcaggacaaagccgaatggggtcaggggatcatcgccacgtttgcatccggctataccgaagggctggtgggcttcggcgtggacggtatcgcgcagtatggcgtgcgtctggacggtggccgcggcaagagcggcgcgggcggcatcgacttctttaagcaggaagacgacggccgggcaaaatccgatctggcaaagtttggcgcgacggccaaaatgcgcatctccaataccgtgctgagctacgggaaccagcgtcctgaactgccaatcattacatccgacagctcccgcctgctgtttgaaagctacaccggcaccctgctgacctcgaaagagatcgacggtctggaagtcaacgccggttacttcaccgacgagcagcgtaaaagcgatgaccgccacgacagcggactgaagagcctctccttcggcggtgcgagctatcagtttaacgaccagttcagcggcgcgctgtacgcctctcataacgaagaggtgatgaacaagcagtacctgggcatgaacttcaaacagcctttcagtaccgggcagcagctggtgctcgacttcaacggctataactcccgtctcgaccagcattacgcggacagcctcaacacgggcctcagcaacaccatctggagcctggcagcgagctatatctgggacattcacacgttcaaagtggcgtaccagcagagcagcggcagtaccggctacaactacggcggctatcgcgacaaaggcggcgtgggtgacggcggtaacaccatctggctggcgaactcctactggtctgatttcaacggcgaagatgaacgttcctggcaggcatcctacggtctggactttggcggccttggtttaccgggcctgagctggaccaccgcctacgtgcgcggcgataacatcaaaacctctgaaaccagcaatggcaaagagcacgagtggtttaaccagatccagtaccaggtgcaggatggccggcgaaagatctgaagctgaagctgcgctactccgtactgcgcgtctccagcaacgccagcgagtacaacgtgggcggggacgagatccgcgcttacgtggaatacccgtttaacgtgttctgatgaaaaaagccgggtggcggcttcgccttacccggcctaccgttttctccctgtggaagagggttaggatgagggggaaacagctagtaaagcgtcttctgcggcggccccgcaaacttaagggcgccaatctgccccatccgcacttccactaccgacggccccggcatcgccagcgcctccgtcatcaccgcatcaaaatcctctgcccgctcaacgctccacgcctgaaggccaatcgcctgcgccagcagggtaaagtccggcgtatgcagttcgttatagtactgacgcccgccaaaatatttatcctgaataccacgcattacgccgtagcccccgtcgttcatgacaagcagcgtcacgttagctttctcctgcgccagcgtcgccagctcgcctaaattgaggctcaggccgccgtcgcccaccagccccaccaccttgcgctgcgggttggcaatcgcggtgccgatggccatcggcagccccataccaatcgccccggcgagggagtgaatgttcatcatcggaccgttagccctgaacaggcggctaccccacaggctgccggacacggtgatatcgcgcaccagcaggccgtctgtcggcagggcttttgctatggcgtcgttaagcttcgcataggcgccgcactgctcgcgcagcccctgttcggcttgcccgaccgcctgctgcacctgcatatcccactggggactgccccactcgcggccctgcactttttcagccagcgcgccaagcaccgctgaacaatcggctatcaacgtgctatccatcaggtagttacggcttgccgccgccgggtcgatatcgatctgcacccgcggggaaggcagctcaagcgtccaggaacgggtttcgttgctgcgcaggcgtgaaccggcgaccagcgtaaaatcgcactgcgcgatcagcgcctcaaccgacggcgagttgtggaacgcgcgaaggctggcgcggtggctgtccggcagcacgccgcgcgcatgggtgctggaaatcacggtgatgcccgcatccgccagcgttttaaccgcgtctgcgctgcccagcgccccgccccccagccacagcagcggctgtttcgcctgtttgagctgcgcccacagcgcgtcaaccatttcggtatccacggctggaaccgatgccggtttaaccggtttagtcaccagcgacagcggaattttggcgccctgaatatcaatcgggatttccaccgagaccggtccgcacggcggggtctgcgcgtcctggatagctttatgcagaatcgctatcgcctgattcgcattgctgatgcggtacgcccgttttgagctggccttcaggaaggtcagctggtcacgggtttcatggataaacccggtgtcggcgtccagccaggctttctctacctgcccggttaaatgcagcagcggcgtgcaggcattcatggcttccaccagcgcgcctaccgcgttcccggcccccgcgccggtgctggtcagcgccacgccgagaccggaaaagcgcccgtgggcatcggccatggtgacggaaccggcttcaccgcgcgcaggcacaaagcggatatggccccgctgcccaaccgcatccgcgatcggcaggttgtgaatggagatgacgccgtagatggcctcaacctgatactgctccagcgttctggcgatggcgtcgccgacggttatcatttcgctcattgctcaccctttctcagtcgcaccagtggttgacgctgttacccgtcgccagataaatgctcttttgttgcatccaggctttcagcccctgaatacccttctcgcggcccagaccgctctctttaaagcccccgaacggggtcgaaatcgcaaaaaccttgtaggtgttgatccacaccgtgcctgcctccagctgctcgctgagacgcagggcgcgtccggtatcgcgcgtccagatccccgccgccaggccgtaaaccgagtcgttcgcctcgcggataagcgtggcttcatcgccaaacggcatcgccaccagcaccgggccgaagatctcttcctgacaggcgcgggcgctgttgctcagcccttcgataatcgtgggcaggaaaaagctgccgtttgccagagcgggatcggcgggtatctcaccgccgcacagcacgcggcccccttcacgcttcgccagttcgacgtactcgatcacgctctggcgatgtttttcgccgatcagcggtccgacatgcacgccgtcggtaaacgggtgtccgacgcgcagcccgcgagttaattccagcagccccgccatcagcggggcgtaaatgctctcgtggataaacagccgcgacccggcgatacacgcctgccccgccgagctgaaaatgccatagcagatcccgcgcgcggcctgttcgatatcagcatcctccagcacgatggtcggcgatttgccgcccagctccagcgaggccgggatcagtttttccgccgccacgtgcgccagatgacggcccgtggtggtaccgccggtaaaggaaattttgcgcacgcgaggatgacgcgccagcgcatcgccaatcaccgagcctttgcccggcaacacgctcagcagcccggcgggcagcccggcctgttcaaaaatccgcgccagctccagcgccatcagcggcgtggcttcagcgggcttgaggatcaccgcgttcccggcggcaatcgccggtgcgaccttctgcatttcgctggcaatcggcgagttccacggcgtgatggccgccaccacgccgagcggctcatagcggctcagcgtcagcagatccggctggcgcggcgtgggcagttccccttccagcagctcgcaggcggcggcaaagtagcgcgccgttcccgccgcgctcatcaccagcccgcgcgcttccgccagcggcttgccgttatcacggctctgcatctgcgccagcgcgtcgacgcgggattcaatgagatcggcaaccttatacaggatcttcgcgcgcatatgcggcaggctgttacgccatgcgggatcgcgccaggcgcgctctccggcgtctaccgcctcctccaggtcatccagactggcggcgttcagcgtcgcgttgatcgacccgtctgccgggaagtggctctgcatcgggttgccgccgccgtgtcgccactggccgccgataaaaatcttcagatcgtccatcgtctctcctcagctcagggccagctcgcggcaggcgcgcaccgcgctcagtgccgccagggtggaggttttaggattagaagccagcggcagtccgctcagctccagatgaaactcgccgaacaatccttccacgtggagcgtgtgggtgttacgtttcgttgccgggtcaaccatcagctgcacgcgggtgtcgtccatcccgacgccgccgagcgccacggtcgccgccacgttggcgttcgccgggaacaggcgcgccgcctcgcgggcgctgccctcgaagaaaacctttgcctctgacaccgcattcagatcgataagctgctcggcatagctgccgcgccagctggccgggcttttgcgcgactgataggtaacgcgctcaaggccgccctctttcgccgccgccagcccgtcgataccggccaccgcaccggaaagcagggtcagttttccgcccgcagcgagcagacgctgctccagcgcgctgtccgccagcgcgccggtggaaatgacggccagatgccagccgcgacgcaggatctcttccccgtactgggccaccgcctgctggctggcgcattccagcaccagatccggcgtttgtgcgcacgccatcggcgacgtcagcgcctcgaccgcattgccaaactggtcgtgaatggcggcatggtgagacgcgcgcgccacgatccagccgatagccacgccggcgggcaggcgctcaatcaccgcctgcgccatggcgccaaaaccaatcaacattacctttttcatgatgtgtccttacagatggcggcagaagccgccggaaacgtccagcgccgcgccggtggtaaacgaggccagcggcgaagcgaggaacagcagcgcctgcgcgggctcctgcggcttgccgaggcgcgccatcggaatgccgcgcttgcgcgcgatatccgccgtccattccggccagctctggcttttgtccgcccggttttcaaagcggcgctgccactggccggattccaccatgccgagcagaatggaattgacgcgaatacctttgcccaccagctctttcgacagtgtcagcgtcatgttcagcagcgcggcacgagcggcggaggtggcgatcatgtgctcctccggctgtagcgccagcagggagttcacgcaggtaacagaggcaatgtcggactgctccagcagaggctgaaacgcctgcaccgggttaatcaccccgaacagtttgagttcggcttcgtgcagccacgcctcgcgcggggtgtcatggaagtgcgccacgtagccctgcccggcgttgttgatcagcatatccgccgcgccaaaacgcgcctgcaccgcatccgcgaaggcctgaacttcgtcggcgttcagcacgtcgcagcggtaagcaaaaatctccccgtggggaaattcgttttgcagcgtcgcatgggcgctggcgagccggtccgggtcacggccgcagaaggcgactttcgccccttcacccagcagcaggcgcagcgtttcaaagccaatgccggaagaaccgccggtaacgaccgctacgcgcccgtcaatttgtgcattcatcgcgcacctcttcgttaatgcgtaaaagctgttggttgaaaaacgcgtcgttatcgagatagctggcgtgcccggcctgcggaatggcgataaacggcatgccgtagcgcagcgccagaccctgaacaagttccggctgggtgatggcatcctgctcgccgcaccagacttcaaacgtgccggagtagcgtttaagccagccgtgaatgtcgtcatgtgccagcatccatgcggcagcgaggtagccttccgggcgcagcgcccgcatgcccgccgcgacggtggcgatatcttccgcgcgcgcgccggggcgcagcagcttcgcggcgcgggtctgggcgaggatgtcgccccccagcgccatctgctgctcgcggttgcgccagacctgctcccgctgctccggcgcggcattgccgtacccctgcgcggcgtcggccagcaccagatggatgacgcgctcagggaacttcgcggcaaaggcgctggccaccagcgcccccagggaatggccgaccagcactgtctgccagacaccggcgcgatccagcatggccgccagcgcgtcggcgtaatcccccgcgttcgcccgcgctacggccagcatcgggctttcgccgtaaccgggcatgtcccacgccagtacgcgaaaaccgttcagcgccatctgcttgtgccaggaggcggcgccggagctgatcccgtgcagcagcaccagcggtatgccgcttccctgttcacgaaaacccgtcatcatgccccccttagttccgcttcactttggaaagcggatggtcggacggataggttgggatttccggcttgttggtccccagcatgacgcacatcagcgcttcttcttcgccgtggttaaacagcccgcgatagatacccggcggaacggagatcagatcacgctcacgcagcacggtttcggtgtagttgtcgccgtcctggatcatcagcgtgatctgccccttgagcatgaagaacacctcttccacgtcgtcgtgcaggtgcagcggtccttcgcacttcgacggcagcaccatggtggagaaggtaaaatggtccgcctgcacggtgttggtgtcgttcgcgacgcccgttgcgccggtgccgatgtagcgcatctgcgcccggcggtatttcgggtcaaaatcggcctggaacttcagcgcgttccagtcgtatttacgcccttcgaagcgcgcgatgcgcgactcgacccactcttccatcgtcaggtggtcaggtttgatgcctgttgtgttggttacggttgaatcagtcatgacactctcctcagtaacgtctcagcagcggcagtaacaggacgcagcccaccgccgccatcaccgccagaaaaatcagcccagaatccatgctgtgggtgaaggcgataagcgcacccatcaccgccggcgacagcgcgcccgcaaagtttcccagcccgttgaagataccgcccgccgtggcgctcacccggggatgggtggccttcgccagcagggcgaaaatgttgggtgcgccggtgccccacataaaggtgctgaagctcatcgccgcgatgacggccagcggggtatcaaggtgcatcaccgccgccagcccgacggccgcccccgccatggagataaagcatgccgccgcgcgcttatcgaccctgtccgagagccacgcgccaatcacttcccctgccagcatggcgatgaacggcatcgacgacagccagcccgcgtgctccagatgaatgcctttgcctttgatcaggtagcccggcagccagccgttgatgccccacagataggtcaggaaagcgatgttaaagatgcagatgatccagaagtgcgggctgacgaacagctcacgccgcgccgcgcgccgctcgtcccgggacgcctgcgaggtgccgggttttgcctccaggcggatcccgcgcagaccaatgcgcacaaagataagcaccggcacggtaagcatggccatcacaaagaaagtgctctgccagccaaaggtgttcagcagccagagggaaagcgggaaaccaatcgccgcgcccaccggggtccccagcagccacagcatggtggcgcgtgcctgtaaatgctgcgggaagttgtgacgtacgatggcgaaggccagcgggaacagcggtccttccgccacgcccagcagaatacgcaggacgatcatcagcgtgtagttatgggtaaagcccatcgccaccatcagcacgcaccacaccgccatcatcccggtgagcaggcgcagcggcgcgattttgtcgcctaaaccgcttaaaaacaccgatgagaagccatagctcagcaggaaagcgctcatcaaaatgccgagacgcgtggtgtcgaaatcaatgcccatcgcctgctggaaatgggtatccgaaaagagcgccgcgatgctgattttgtcgaaaaacgccagcagcacgcaggccagcagcgacagcgggatggcccagcgcaccgctttttcgggcgtgcgggtcccctcaccgctcgcctcaaccggtgcggtgttagtctcgagtgtggtcatctctccccctacaggtgcgggttagctatcgcagtgacatcagtgaaaaggtcgggtcggcgagcggcacgtcggacagatcccgccccgccgccatccagcgcttcgccagcttgacggtacgcgcatcgtcgaacgccaccagctgcgtcagcctcccgttgtcgtccagcgagaagtacagcgcctctttacgcacgaccgttctgctgcctggctgcggaataccgaggatctgaatattgtgctggtattgatccgaccacagccacggcgcgtcgtcgtagcctggcgcatccgggttgagcatcgctttcgccgtcgccaccgcctgattctgggcgaaggcccaggactggatgcacaagccgtagtgatggtgctgggcgacatctcctgcggcaaagatgaatggatccgaggtgcgtccctgggcatccaccacgatcccgcgcccggttttcagccccgcatcgcgcgccagctccagattgagatcgacgccgatcccaaccacgaccgcatcaaaggtttcacgctggccgtcgcagtggatgaccggcaggccgccgtcgtcctccagctccagcgcaccgcagccggtacggatctccaccccctgctcgcggtggatggcctccaggcgctgcgacacctcgccgctcaccgagcgcatgcacagcgcgggctgctgctcgaacagggtgaccgccacgccgcttttccgcgccgaggcagcaatctccagtccgatccagccgccgccgacgatcgccagttttttactttccgccagacgacttttcaggcgctgcgcgtcctgccagtggcgcagggtatagacctgcggatggctggcccacgcctgcgaaggcaggcgcgcccgaccgccggtagcgattaaaaggatgttgtaactaagccgctcgccgttgctaagaacaacttttttctcatcgcgatcgacagattcagcgcgcagcggccggtaccaggccaggttcagcgcctgctgcacctcgtcggtaaacagccttgggagcgccgcgttcggctccagcaaagacgctttcgacagcggcgggcgctcgtagaaatcccattcttcttccgctaccacgcaaatctcgccgtcgaaaccctcatcgcgcagggttttcgccgcccagccgcccgcctgaccgccgccgataatgacaatgcgcgatgtcataccgcctccggctttttctgctgacggcgcgtgtcgtggtcaatcccgccttccaccgcccactcggtaaaggagaccagcgaatgctccagctcacgcggctgccagttttccgtcagataatcatcgttggtgtaatactcaaacgccccgccggtcgggctgttgacgtaccagaagtacgccgacgacaccggatgacggcccggcccgataaaggtgctccagtcatgtttattcatcgcgataccgccgccgatcacctcgtggatgtcgcgcacggtgaaggccacgtggttgaggccgcgcttgcggttcggcagttgcagcaggaacaggttgtgatggccgccgcgcacgccgcagcgcaggaacacggcgcggttgatatagcggtccgagacctggaagccgagcacctcgcggtagaatttctccactgccgccagctcttccacgaagaacaccacatgccccacgttgatcggctgggcgcgatcgtaaaccgggctgggggtgtcgatacggcgggcatcgccccactggttaatcggctcgacgttcagctccacgtcagtttgctgggtcacctgcacgcgcagcgtcatgccgttcgggtccaggcactccagcgcgtcgcccacttcacgaaaacctggctgttgcgccagcttcgggcgcagcgcgtccagatcagactggctggcaaccgcccaggtcatgcggcgcagggtgttgcccgcttcaaacgcgggcggcaggtcggggctgtcgatcgggttaagctccacgcgcgcgccgctcagggtggtgaaacgctggccgctggcatcgcccgtcaggccaaaatcacgcataaatttggcgcagtgcgtcaggtcttccacaccaaattccagcttttcaattccggttacactcatcgttcgttgcctcatctggcccagattgggcgtaaaacatgcccgacgcagtcaagcgcctgacgttaactcactgatttaactggcctgtgacaaataccctaagaagccagaaattttatccgccgcgaggcgaacctcgttttgcaggcgctcgcggtcgctctgcgggatctcctccgacggcaccagaatgctgaccaccgccgccacgcggccgcttcggtcatacaccgggtagacgatggaagagatgccgtggcggaagaaggattcgccgatgacatacccgcgggctttgtcctgctgcaccatctgccacagggcttcgcggtcgtgaagctgccccggcgtgttgcccggcagacgctcatgcgggaacagctgttcgaaatcagcgcgggaaatatcggtcaacagcatgcggcccagcgaggtgcagtgcaccggcagacgggtaccaatgctgacctggttgatgcgcgacccggcggcgctgacgcgggcgatgtagataatgtcgcgcccgtcgcggatcgccagatggctactgcactggctcacgtcgcgcagttgctcgatcaccggctggccgacctgcgccacgtccaacgaggcgatgtactcaaagccaagacgcagcacgttcatgcccagcgaaaaggtattggtgcgcgtgttacgctccagaaatcccatgtactccagcgtctgtaccacgcgataagcggtggccttcggcatatccaccagccggtgcagttcggcaaaggtcagatcgcgatgctgctcaccaaaggccaacagcagctgtaaaccgcgctccagccccggcaccagatacttcacttcctgatcgtttgccatcatcgccctaccttagttaaagacaaaaccgccgttgaccgggatcagctgtccggtgataaaccgcgacagatcgcttaacagccagaccacgctgccggtgacgtcttccggctgctgcgcgccggttaacgcgcgtccgttttcgtagagctgatgccgttcggcggggacatattccgtcgcctcgacgcgggttagccctggtgcgatggcgttgatacggatacgtttttcccccagctcgcgcgccattgagcgggtcatggcaatcacggcccctttactggcgacgtaggccatcaggcgcggcgcgccccacagcgcggtgtcggacgccacgttcacaatgcctgccccttcgcgcagcagcggcacggcggcgcgcgtcaccagccaggtgcctttgacattgacgctcatcacccgatcccagagatccggatcgtaatcaagcatgtttttgccgccgacgcccgtcgccatcgccgcgttgttcaccaggccgtcaatctgcccctgctcgccaatggcgctgaacacctggtcgatggagtgctgatcggccagatcaataacgtgcgattcgatcgcatagccctgctcgcgcagccggtgggcgctctcggccagctcgcctttgaggatgtcgcacatcaccaccgccgcgccctgctccgcgcaggcctgggcaaagtggtagcccagcccgcgcgcggcaccggtcaccacgatgcgcttgccgctcagcagccccttcatcaggcggctccctgctgtgcttcacgcatcgccagctgctctttggcggctttttgcatcatgcggcgcaggcgcgagaggccaacgtcgtgttgatacaggtattcatgatcgcgcgcgtttggcgccaggctctccagcaccacgcggtcctgctccagcacttcccagtgcagtttttccagccggttgcggtacatgaagcgccacatatcgcgctgccagccctgtacgcggcggatgcgccagaagaagacgcggcagttgtcgttatcttccggcaccaccatgccgacgataaagaagtggccgcccggtccgaagcgcttcttgtacggaatggagaggcgcatccagcaggtgccgctgttgcccagctccacccagtcaaaattgacgccgctctgccctttcttctcgaaaataaaaccggttttggtcggctggagcaccatgtcggccttgcgatccccttccgccatcgagtgcgaggacgaatgcagataggtgccgtgcatcgggtccatcacgttttccagcgcgtactggtagttgcatttccacgcggcggtgcagaggaagttgctgaagttttccgtgtcggcgagttcatccgggaaggtcagttcgtccggctgctggtccgcggtgacgccaaaccacaggaagatggcgccgtgcgcctcctgcacgttatagctgcgcacgcactgctggccgaccagcggacatttatccacggcgggcacgtctttcacctcgccgttgcccgccacctctacgccgtgataccagcaggcaatgcggtccccgaggttccagcccatcgacaggcgcgcaccgcgatgcggacagcggtcctccagcgcctgaacctgtccatctttattgcgccagaccacaatctgctcgcccaggcgggtgatgcccaccggcgcagactgcacttcccagctcgccagcaccggataccagaggccgcgcaggcctttatcaagatagttttgtacggtcgtcgtcatcgcgttgccctcagtagccgttaacctgtaagaatgcctggaagctggcgtcgctccacggctcgccctgctggtcgtgcatacgcaccgcgttcagcccgcttaccagctccggcagggtttcaacgccctgctcgaagagatcttccagcgtcgcaatcagcttcacttcccagctttccggctcgcggctgcgggtctgccagatcaggttctggtactcgcccggcttgtgaatggcgccattaccgccctctgccggcggggtaaactggcggctttccggcagcgccgggttgtagttcagcgtgtcgctcatgccacggtctcctcaacgaaggtaatctgaatctggttttcaaagacccgaaccgggtatcggttgaggttgcgtcctccggggccgtgcagacactggccggttttgacgtcgaacaccgcctcgtgcagcgggcattccaccttgccgtcttccacgaagccctggctcagcagggcataggcgtgcgggcatacgtcctccagcgcgtaatattcaccgtcgatcaggtaaacgccgatctctttaccgtcgacgttgccgctaaaagggaaatcttcctgtacttgttctgcgtcacatacgcctatccagctcatcacgatcctccaggcttttgtttcatatatgaaactctgtttcttatttaatacggtcaatataaaagcgatgaatgtttcgtcaagcgacaatgtgacgaatttgttaatcgatcggcaattaattaactaagtgtgcaagggatcacgaaaaaatgcagcgatatgaaattttcattattgcagcgtgagaaatacgtttttttaatggtctcttattttcaataaaagatattgacttcttttctttttactctctaaaaataaatgaacgtcacctctttcgcgtttcgcctgtgaaacgaaactttaatttatctttaataaacaaagagtttcacaggtgaaccattttagctccgtgacaatcacattgatgaaaaatataagttacaaaaaacgtaaggcggacatgatgacggcaagatggcaaggcacgatagcgcttttattactcattattatttcctacgtcgatcgggtaaatatctcggtaatgattttaaacccggaatttgccgaacattttcagttaaatgaaaacagaatgttacagggcctgctcatgacctgctttcttctgggttatgggttttccgctttattattaacgccagttattgaaagcaaacttcattatcggcaaggattattaagcagcattgcgatttgggccgcggtctgcgcggcttcacctttgctcggctcgctgacgggaatgctcatcgcccgcgtgattctggggatcgcggagggaccgcttttttcactgaaaacgcgctttatcagcgataactttagcgcgcaagagatcggcaaacccaacgccgtgaccgcgctgggcgtctcgctcgggctggccgtgggctttccgctggtgacctggctgatgtcgcatctgggctgggccgggtcgttttacgccctggcggtgatgaatctggtgttgggcggcgggctcatctggcgttttctgcccgcgccacacagcccggtgaagatgaaaaaaccggggtttgttcacaccttcacgctggcctggcagacgccgctgctgggctggatcctgctggttgaaatcgccacgctgagctatctgtggggcagcagcgcgtggctgcccgcatggctgcgtgacgagcaccacttctcgctgcacgcgacgggcatgcttgcggcggtccccttcctgctgagcctggggtcaaagtttctgggcggcgtgctgctcgacaaaatgcggccggaacaggcgccggtactgtttgtggtgggcggtacgttgacggcactctccgtgatcgcactgatgctcagccatcaacccgcatggctggcgctctttatgctttcggctaacgtcttctgggggctacagggagcggctattccggcggtgatccagcatcacgccgcgcgggaagcggtgggcagcgcttacggcataatcaatgggatcggcaatatctgcgcggcgtttattccgctgctgatggggatggtgatgagatcggtggggtcggtcagttcaggcttttcggtgctggtcgtctcgcaggttgtcaccctgcttgccgggggaatgttgctgctgcgcatgcggcgcgcagcagcaatcagcgcgtaaggcttattcgccttttttcgccgcctggatgtagagcatttccagcgccagggtcgccgcggccagcgcggtgatctcggactggtcataggccggagctacttccaccacgtccatcccgacgatgttcagatccttcaggccgcgcaccagcttgatggcgcggtctgatgtcaggccgccgatcaccggcgtaccggtacccggtgcgaatgccggatcaaggcagtcgatgtcgaaggtcaggtagacaggcatatcgccgacgatctgcttaacctgagacagaatatcgtccacgccgcgatcgttcacctggcccgcgtcgagtacggtgaagccgttgtctttgtcgaactcggtgcggatgccgatctgcacggagtggtttggatcgatcaggccttctttcggcgcggtatagaacatggtgccgtggtcgaattcacagccgttcgcgtaggtgtcggtgtgcgcatcgaagtgcaccagcgccattttgccgaagtgcttcgcgtgggcgcgcagcagcggcagggtcacgaagtggtcaccgccgaaggagagcatgcgtttaccggccgccagcagcttctcggcgtgcgcctgcaatttttcgctcatttcacgcgcgtcaccgaaggcgtacaccagatcgccgcagtccaccacgttcaggcgctcgcgcatgtcgaagttccacgggaagcggttgtgctcccaggccaggttggtggaaacctgacggatcgccgccgggccatgacgtccacccgcgcgaccggacgttgccatgtcgaacggtacgccggtgatcacccagtccgcatcgctgtcgtacggctggaagttcatcggaaggcgtaaaaaaccaaacgcgttagataccagagagttatcgtactgatgacctaaagtgctcatgtcctgacctcttataaagtcgatacattaaaaacagatgaaaaaaaatcccctccgcgtcgttaaacccgacgaggaagggattgattcgtaaatcgcatattggggcgaattatcgccgttaatccatatgggttcaagtgagtatagcattctgccggatggcggcttcgccttctccggcctacattcgtaggcccggtaagcgcagcgccaccgggcatcggcggcacagcggcctgatgccctcaccccgcccctctcccacagggagaggggggttttcttactcgtcttccagatacgtatacccgtacagacccgcttcaaactcttccaggaactgctgctgcaaggcatcgtccagaccggtgtttttcacctgatcgcggaactgggtgagcagttttttcggatccagctgaacgtattcgagcatgtccgccacggtgtccccttcgtcggacagctcaacctccacgctgccgtcagggaagacaaacacgtcaaccgcttcggtatcaccgaacaggttgtgcatgttaccgaggatctcctgatacgcccccaccataaagaagcccagcattggcgggttctccggatcgtactccggcattggcatcgtcgttgcgataccgtcgccatcgacgtagtggtcaattgcgccatcggagtcacaggtgatgtccagcagcacggcgcggcgttccggggcgtggttcagcccttccagcggcagaaccgggaacagctggtcgataccccaggcatccggcatcgactggaacagggagaagttgacgtacattttgtccgccatacgctcctgcaactcgtcgataattggacggtgcgcgcggttgctcggatcgagctgtttctgcacttcgtggcacatattcagatagagctgctccgcccacgcgcgctcttgcaggctgaaggtgcctgacgagtagccgacgtgaatatcgtgcaggtccatctggctgtcgtgcagccattcgcgcagggaacgacgcgtgcccggctcgtgcatctcctgccaggtttcccacatgctttgcagggaacgtggggcatcgtctgccggaggcgtggcttcggtgatttcgctacgctcaacgccaatgatgttagagaccagcaccgtatggtgcgcggtgaccgcgcggccggattcggtgatcaccgtcgggtgcggcaggccgtgctcttcgcaggcatcgccaatcgcccagatgatgttgttggcatattcgttcaggccatagtttaccgagcagtcagactgcgagcgggtcccttcgtagtccacgcccaggccgccgcccacgtcaaagcactgaatattcacgccgagcttatgcagctcaacgtagaaacgcgcggattcacgcaccccagtggcgatgtcgcgaatattggccatctgcgaaccgaggtggaagtgcagcagctgaatgctgtccagacgaccgcgctcgcgcagaatttccaccagctgaagcacctggttcgccgcgaggccgaacttggatttttcaccgccggaagactgccatttaccggaaccctgcgacgccagtcgcgcacgcacgccaaggcgtgggatcacgttcagacgctcggcctcttccagcacgatcgcgatttcggtcatcttctcgatcaccagatagaccttgtggcccatcttctcgccaatcagcgccagacgaatgtattcgcggtctttatagccgttacagacgatcaccgaccgggtcatgcccgcgtgcgccagaaccgccatcagctccgctttagagcctgcttccaggcccagcggctcgccggagtggatcagggactcaatcacgcgacggtgctgattgaccttgatcgggtaaacgaggaaatagtcgccgttataaccatacgattcccgcgcgcgtttgaacgcggcattaatagaacgcaggcgatgttgcaggatctgcgggaagcagaacagtgcaggcaagcgctgaccctgcgcttcacgggttttcaccagtttagcgagatccacgcgcgcttccgggacgtccggatccgggcagacactgatgtggcccagctcgttaacgtcgtagtagttattgccccaccaggcaatattgtaagtgcgcagcatcttgctggcttcctgggagctcatcgcaacctcctgcatagaacgtagtacaccctgttcgcctgctgacgaaggcgaaagcgaagacatgtcgtcagacatagcgaacctcaactctttgtattaagtgtaaaacagttgactactatcgcagcgttatacggcgataacaacccattaacggctccatttcccagcagagtatgctgaaatccagaccgtgcgaccggtttcttattcatatcattgtaaaacacgtatccgaactctgtatgacaaggttcggcgaaaccacgagaaaactcctgtattaacaagagcgcccttgttcagttttcacaaagcgtgaccggctctggaatcctgagaagcaccgagatgggtataacatcggcaggtgtttagaccagaagtgcgggtgggaatcaaatgcgcgccagaacggctgcgctgaatgagcggaaaacgatggttcattatctcgtatcacctccacggccgcctctgctgaaacggaccacaagccaaagctaacagttcactgcttaacccggctggaagtggcgacacgatgtgttcatcgagcgcttattttatatgagccgcgcgccgcgttttataccgagaaggtcgctaaaaagcaaaacaaaaatgcgcaggttgccagcgtcgtcaggaaaaatttccagccgtgttttcaacgcagtgagaggtgagtcaaaaaaaactggaaatcgggtgaagaagtgacctaaaatagacgtccagatgttaatccatccataccgattaacactcagactgccagtgtcaaaatcctgtaggccttggtagaattatctcctatggctattccacacagcagcttgagctaaccaaattcctcttaggtgaaataaaacatggcaaaacacctgtttacgtccgagtccgtatcagaaggacatcctgataaaattgctgaccaaatctccgatgcggtgctggatgcgatcctggcgcaggatccaaaggcgcgcgtagcgtgtgaaacctatgtcaaaaccggcatggttctggttggcggtgagatcaccaccagcgcatgggttgatatcgaagagatcacccgtaacacggtgcgtgagattggctatgtacattctgatatgggctttgatgccaactcctgcgccgtactgagcgcgattggcaaacagtctccggatatcaaccagggcgttgaccgtgccgatccgctggaacagggcgcgggtgaccagggcctgatgttcggctacgcaaccaacgaaaccgacgtgctgatgccagcgccggtaacctacgcccatcgtctggtgcagcgtcaggctgaagtgcgtaaaaacggcaccctgccgtggctgcgtccggatgcgaaaagccaggtgaccttccagtatgacgacgggaaaatcgttggtatcgatgcagtggttctttccacgcagcatgctgaagagattgaccagaaatccctgcaagaagcggtgatggaagagatcatcaagccggttctgccaactgaatggctgagctctgcgaccaaattcttcatcaacccaaccggacgctttgttatcggcggcccaatgggtgactgcggtctgaccggtcgtaaaatcatcgtagatacctacggcggcatggcacgtcacggcggcggcgcattctccggtaaagatccgtctaaagttgaccgttctgcggcgtacgctgcacgttatgtggcgaaaaacatcgttgctgccggtctggctgaccgctgtgagatccaggtttcctacgctatcggcgtggctgagccaacctccatcatggtggaaaccttcggtactgaaaaagtgccttctgaacagctgaccctgctggtgcgtgagttcttcgacctgcgtccatacggtctgattcagatgctggatctgctgcacccaatctaccaggaaaccgcagcgtacggtcactttggccgcgaacatttcccatgggaaaaaaccgacaaagccgccctgctgcgtgatgctgccggtctgaagtaatcgactgccagtagcttaaacaggccagccgttgtgctggccttttttatgtcgggtggcggctatgccttacccgacctacgagtagtgagtttttgtaggccgggtaaggcgcagccgccacccggcaatgtttggaaccgtttacacctcactctctataccccgctttcagaatattctctttgcatgatcgcatttcttctgctgttacattccctttcagttaagtctgaaatttgtgcaaacgcgatgcacatcaattaatttacctctatattttcaaagctttaattatttttacggttacaaactagtgtaaccgattacaccgctgtgatttgactcacatatttttatgagccgctcacctactcttaatatcgtaaaaactgataacccaactggagggcataatgcctgacaataataaacaggggcgtacgtccaataaggcaatgacgttcttcgtctgcttcctcgccgctctggcaggattactctttggcctggatattggcgtaattgccggtgcattacctttcatcaccgatgagttccagattagcgcacacactcaggaatgggtggttagctccatgatgttcggtgccgccgtcggcgcggtcggcagcggctggctctcctttaagctcgggcgtaaaaagagcctgatgatcggcgcgatcctgttcgttgccggctcactgttctctgccgctgcacctaacgttgaagtgctgatcatctcccgcgtgctgctcggtctggcagtgggcgtggcgtcttatactgccccgctgtacctgtctgaaatcgctccggaaaaaatccgcggcagcatgatttccatgtatcagctgatgatcaccatcggtattctgggggcttatctctcggataccgcattcagctacagcggcgcatggcgctggatgctgggcgtaatcatcattccagccatcctgctgctgattggcgtcttcttcctgccggacagtccgcgctggttcgccgccaaacgccgcttccatgatgccgaacgcgtgctcttacgcctgcgtgataccagcgccgaagccaaaaacgagctggaagagatccgcgaaagcctgaaggtcaaacagtccggctgggcgctgttcaaagagaacagcaacttccgccgcgcggtgttcctcggtgtgctgttacagatcatgcaacagttcaccgggatgaacgtcatcatgtattacgcgccgaaaatcttcgaactggcgggctacaccaacaccaccgaacagatgtggggcaccgtgatcgtcggcctgaccaacgtgctggcgacctttatcgctatcggtctggtggaccgctggggacgtaagccaaccctgacgctgggcttcctggtgatggccgtcgggatgggcgtgctgggtaccatgatgcacatgggcattcattccccaacggcacagtacttcgccgtggcgatgctgctgatgtttatcattgggtttgcgatgagcgccggtccgctgatttgggtgctgtgctctgagatccagccgctgaaagggcgtgattttggtatcacctgttctaccgcaaccaactggattgccaacatgatcgtcggcgcaacgttcctgaccatgctcaataccctgggtaacgccaataccttctgggtctacgccggtctgaacctgttctttatcgttctcactatctggctggttcctgaaaccaaacatgtttcactggaacacattgaacgtaacctgatgaaaggtcgtcctctgcgcgaaatcggcgcacacgactgatcctcctgcgggaggcgcctcttgcgcctccccgcttcccgctttatgctctgcccctatgaaagctccccgtctccccatcgccattcagcaagccgtcatgcgcagcctgcgggaaaaactcgcccaggccaacctgaagctcggccgcaattatcctgaaccgaagctggtctatcagcagcgtggcaccgcggcaggcacagcctggctggagtcgtatgagatccgcctgaatccggtgctgatgatggaaaaccagcaggcgtttatcgacgaagtggtgccgcacgagctggcccaccttctggtgtggaagcactttggccgcgtcgcaccgcacggcaaagagtggaaatggatgatggaggcggtgctcggggttccggcccgccgcacccatcagttcgagctggaatcggtacgccgcaataccttcccctaccgctgccagtgtcagcagcaccagcttaccgtccgccgccataaccgcgtggtgcgcggcgaagcgacctatcgctgcgttaaatgcggcgaaccgctggttgcggaataatcactcgaactttcaggaactttcctgatctgactgattgcatacgggaacaacattcgttacgttgcgggctcgttttgacacggagtgtaagatgtcccgtaatgtttctctcgcggtcgcttttctggcgacagcgctatccggccatgctctggccgacggtattcacagtttctctcaggcaaaaaccgcaggcgtaaagattaacgccgacgtaccgggtgatttctactgcggctgtaaaattaactggcagggtaagaaaggggtcgtggatctgggatcctgcggctataaggtgcgcaagaacgagaaccgcgccagccgaatcgaatgggaacacgttgttccggcctggcagtttggccaccagcgccagtgctggcaggacggtggacgtaaaaattgcgcaaaagatccggtctaccgccagatggaaagcgatatgcacaacctgcaacccgccgtgggtgaggtcaatggcgaccgcggaaacttcatgtacagccagtggaacggtggcgaaggccagtacggtcagtgcgccatgaaggtcgatttcaaagagaaagtcgccgaaccgcctgcccgcgcacgcggcagcatcgcccgcacttacttctatatgcgcgaccgctacgatctcaatctttcccgccagcagacgcagctcttcaatgcctgggacaagctctacccggtgacggactgggaatgccagcgcgacgaacgtatcgccaaagtccaggggaatcacaacccttacgtccagcgggcttgccaggcgcaaaagagctaacctacactacggcaattcgcttatatcgcatgacacatggaatttctgactatgcgcatccctcgcatctatcaccctgaactgattaccccaggcggcgaaatcgccctgtctgatgatgccgcaaaccatgtaggccgcgtgctgcgcatgggtgcaggccaggcgattcagctctttgacggctctaatcaggttttcgacgctgaaattacgcgcgccgataaaaaaagcgtgcacgtgaaggtgctgcgtggcgaggtggatgaccgggaatccccgctgcacattcacctgggccaggtgatgtcgcgtggggaaaagatggagttcaccattcagaaatccattgaactgggtgtaagcctcattacgccacttttttctgagcgctgcggcgttaaactggatgcggaacgtctgaacaaaaagatccagcagtggcaaaaaattgccattgcggcctgcgaacagagcggccgcaaccgtatcccggagatccgcccggcgatggatctggaggactggtgtgcagaagaggagagcgggcttaagctcaatcttcatccgcgcgccagcgccagcatcaatacgctgccgctgcccgttgagcgtgtacgcctgctgattggcccggaaggcggcctgtcggctgacgaaattgccatgacggcgcgttaccagtttactgatattctgttgggacctcgcgttctgcgcactgagacaacggcactcaccgccattaccgcgctacaggtgcgatttggcgatctgggttgaagcaaagcctgacccataaccggagaagaagatgattaagctcggcatcgtgatggaccccatcgcaaacattaacatcaagaaagactccagcttcgctatgctgctggaagcgcagcgtcgcggctatgaactccactatatggagatgaacgatctttacctgatcaacggtgaagcccgcgcacgcacccgcatcgttaacgtcgagcagaactacgaaaaatggtacgaattcggtaccgagcaggatattgccctggccgaccttaacgtgatcctgatgcgtaaagatccgccgttcgacaccgaatacatttacgccacctatatccttgagcgtgccgaagagaaaggaacgctgatcgtcaacaagccgcagagcctgcgcgactgcaacgagaagctctataccgcatggttctctgacctgacgccggaaacgctcgtcacccgcagcaaaacgcagctgaaagaattctggcagaagcacggcgacatcatcatgaagccgctggacggcatgggcggcgcgtcgatcttccgcgtgaaagagggcgatccgaacattggcgtgattgccgaaacgctgaccgagctgggaacccgctactgcatggcgcagaactatctgccagccattaaagacggcgacaagcgtgtgctggtcgtagacggcgagccggtgccttactgcctggcgcgtatcccgcagggaggggaaacccgtggcaacctggcggctggcggccgtggcgaaccgcgtccgttaagcgaaagcgactgggaaattgcccgccgcgtcggccctacgctgaaagccaaaggcctgatcttcgtcggcctcgatatcatcggcgatcgtctgaccgaagtgaacgtcaccagcccgacctgcattcgtgaaatcgaagcggaattcccgatctcgatcaccggaatgctgatggacgctatcgaaaaacgtttacagaaataacctgtgacagcgcctgtgtttatccccatactgggcgctgtcgctttttaaaccaggaaacagtacctctgacaatgaatttacagcatcactttcttattgccatgcctgctctccaggatccgattttccgccgctccgtggtctatatttgcgaatacaacgaagacggcgcgatggggattatcatcaataagccgctggaaaacctccaggtggaaggcattctggacaagctgaaaatccctgctgaagcgcggctgccggaaatccgtctcgataaaccggtgatgctcggtggcccgcttgcagaagatcgtggctttatcctgcataccccgccggttttctcgtccagcattcgtatctccgataacaccgtcgtcaccacctctcgcgacgtgcttgaaacgctgggcactgccagtcagccttctgaggtgctggttgcgctcggctacgcctcctgggaaaaagggcagctggaacaagaaattctggacaacgcctggctgacagcccctgcggatatgaatatcctgtttaaaacccctatcgccgatcgctggcgtgacgcggcaaaactgattggcattgatattctgaccatgcctggcgttgcggggcacgcgtaatgagcggcacccttctcgccttcgacttcggcaccaaaagcatcggcgtcgctgtgggtcaacgaatcaccggcaccgctcgcccgctcacggcgctgaaagctaacgacggcacgccggactggaaccttattgagcgcttgctcaaagagtggcagccggacgacgtgattgtcggcctgccgctaaacatggacggcaccgagcaaccgcttaccgcccgcgcgcgcaagttcgcgaacaaaatccatggccgctttggcgtctccgttaagctgcacgatgaacgtttgagcaccgtcgaggcacgcgctggcctgttcgagcacggtggcttccgggcgctgaacaaaggcagcgtggattcagcttcagccgtcattatcctcgaaagctatttcgaacagggttactgagcgccggggctacagccgcccctgcgcccgtcgctccgccagactctgctcaaagttctgcattcccgcctgctgccccgtttgaataatgcccggcagttgccaggttttgccttcgcggatcaggtttgccgccgccgaggtattcaccagtagctcatacagcgccacgcgcccgccctggacatcctgacgtagcttctgcgccaggaccgcacgcaggcttcccgccagctgattacgcaccggatctttctcctgagccggaaaggtgtcgaccaggcgctcgatcgcctgcgccgcaccgcgcgtgtgcagcgtggccaacaccagatggccggtttccgccgccgtcagcgccaggcgtatcgtctcgctgtcgcgcagctcaccaagcagaatcacatccggatcttcacgcagcgcgctgcgcagcgcctcggcaaaggacgggctgtgctggcctatctcccgctgctggatcaggcaacgttcgctctggaacataaactccaccggatcttccagggtcagaatatgcccgtccgtctggtgattgaggaaatcgaccatcgcggccagggtggtcgattttccgctgccggtggcgccggtgaccagaatcaggccattgtcattggacagcagctccgggatcgctcgcggtacacctagcgcagagagctgcgggcacgtcagcggcaacagccgcagcgcaatcgaaacgccgtgcatatgcttaaacgcactgccgcgcagccgctgacggcctgcgagggtaacggcaaaatccacctgcccgtttgcccaccatgcgccctgctgttcgtcgttgagccacgcttttaataacgcctccacatccgggggcggaaacggcgcaggttcaagacggcctgacctgcgccagcgcggtggcgaatcactgcacaggtgtagatcggagacgttatgctttacactaagggccacaatttcttccacatccatagactactcctcggaaaatgaacgacattgcgcataacctggcacaggtccgggacaaaatctcagccgcggcaacgcgttgcggccgtgctccagaagaaattacgttgcttgcagtcagcaaaactaagcctgcgagcgccatcgcagaagcgatagccgccggtcatcgtgcctttggcgaaaactatgtgcaggaaggcgtggataaaattcgcgctttccgggaacggggaaatacagacctgcaatggcactttatcggtccgctacagtcgaacaaaagccgtctggtagcagagcactttgactggtgccacacgatcgatcgtctgcgcatcgctacccgtctgagcgaccagcgcccggcggagatgccagcgcttaacgtactgattcaaatcaacatcagcgatgaaaacagcaagtccggcattacgctgggcgaactggatgcgctggcggcggacgtggcggcgctgccgcgcttaaccctgcgcgggctgatggctatcccggcgccagagtcaagttatgaaaggcagtttgccgtggcacagcaaatggctgtagcatttgaggcgcttaaggcgcgctatgacacggtagacacgctttctctgggcatgtcggacgatatggaagccgccatcgcggcaggcagcaccatggtgcgcatcggcacggcaattttcggtgcgcgcgattacccccaataataaggaaacctgaggaacgccatgaagacgttgactttcctgctttcaacggtcattgaactgtatacgatggcgctgctgttgcgcgtctggatgcagtgggcccgttgtgatttttacaatccattctcacaatttatcgtgaaaatcacgcagcccgttgtggggccgcttcgccgcgtcattccggcaatggggccaattgacagttcatctctgctgatggcgtttattctgagcgttatcaaagcgatcgtgctgtttatggtcatcactttccagccgattatctggatttcagccgttctgatcctggttaaaaccgtcggctcgctgatcttctgggtcctgctggtgatggcgatcatgagctgggtaagccggggccgtagcccggtggagtacgcgttgattcagctgactgaaccgttgctgcgcccgattcgtagcctgctgcctgcaatgggcggaatcgacttctccccgatgcttctcgttctgctgctgtacgtgctgaatatgggtatcgcggaactgttacaggcgacgggtaatatgctgctgccggggctgtggatggcgttatgagtgcagttagcccctgcgccgacgggctggttttacggctgtacattcagccgaaagccagccgcgacagtattgttgggctgcatggcgacgagctaaaagtcgccatcactgccccgccggttgacggccaggcgaatgcgcatctgaccaaatatctggctaaacagtttcgcgtcgctaaaagccaggtcatcattgagaaaggtgaacttggccggcataaacaggtaaaaatccttaacccgcaatctatcccgacggaagtcgcggctctgacagaacaggactaaaccatgcagaaagttgttctcgccaccggtaacgccggtaaagtgcgcgagctggcctcgctattaaatgattttgggctggacgtggtggctcagaccgagctgggcgtggactccgccgaagagaccggcctgacgtttatcgaaaacgccattctgaaagcgcgccatgcggcgcagatcaccggactgcccgcgatagccgatgactccggtctggccgtggattttctgggcggtgcgccggggatttactccgcccgctattccggggtggacgccaccgaccagcagaatctggaaaagctgcttgtggccctgaaagacgtccctgacgaacagcgtaccgcgcagttccactgcgtgctggtctacatgcgtcacgcggaagatcccacgccgattgtctgtcacggcagctggccgggcgtgatcacccgtgaagcggcgggcaacggcggctttggttacgacccgattttctttgtcccgaccgagggaaaaaccgctgcggaactcacccgcgaagagaaaagcgcgatctcccaccgtggacgcgccctgaaactgttactggaagcactgcgtaatggctaatttgccgcctctgagtctttatattcacatcccatggtgcgtgcagaaatgcccgtactgcgatttcaactcgcacgcgctgaagggcgaagtgccgcacgatgattacgtcgcgcatctgctggccgatctggatgctgatgtatcgtacgcacagggacgtgaagtgaagaccatttttattggtggcggtacaccgagccttctttcaggcccggcgatgcagacgctgctggatggagtgcgcgcacgcctgaacctggcagtggatgctgaaattacgatggaagccaaccccggtaccgttgaggccgatcgttttgtcgagtatcaacgcgcgggcgtgaaccgtatctctatcggcgtgcagagctttagcgagccaaagctgaagcgtctggggcgtatccacggtccggaagaggcaaagcgcgcggcaaacctggcaacagggcttgggctgcgcagctttaacttcgacctgatgcacggcctgccggatcagtctctcgaagaagcgctggacgacctgcgtcaggcgattgaactgaatccgccgcatctgtcgtggtatcagctgaccattgagccgaacaccctgtttggttcccgtcctccggtgctgccggacgacgacgcgctgtgggatatcttcgagcagggccaccagcttttgaccgcggcggggtatcagcaatacgaaacgtcggcgtatgcgaagccgggctatcagtgtcagcacaatctgaactactggcgttttggtgattatctgggaattggctgcggcgcacatggcaaagtgaccttcccggacggacgcattctgcgtaccgctaaaacccgtcatccgcgcgggtatatggaaggccgctacctggagcgtcagcacgacgtcgaggcggcggataaaccgtttgagttctttatgaaccgcttccgtctgctggaagccgcaccgcgcgcggagtttgcgctctacaccgggctgccggagtcggtgattcgtccgcagattgacgaggcgctggcgcaggggtatctgaccgagtgtgatgagtcctggcagatcaccgagcacggcaagctgttcttaaactcccttcttgagctgttcctcgctgaaaatcctgaaggctgattcaggattttacatcccgttctgctggctgagggaaaggctggcagagtgtggggatggaaaaatcaaaacaactctgcaaacaaatgacacccgaagaattacgcctctggtatttgctcagaggtcgtcgtttcttcgggtataagtttcgtcgtcagatgccggttgggccgtatatcgtggattttgcctgctttaaggcgaagctgattattgagctggacggtgggcagcatcagaacaaagagaagtatgattctcaccgtaccgagtttttgaatgcgaacggctgggaagtcgtacggttctggaataatgaattcaggactaatgaggagcaggtgctgatggctattttgcaacgattgcaatgcctgatgccctcaccctaaccctctcccacagggagagggaactggttactccctctccctgtgggagagggccggggtgaggggtcctgcgcgcagaggcgttacttcagcgtccccaccagcgccttccggctgtcttccagcgacaccacgcgtttacacacgtctttgccgaactgctggaaatcggcttcctgattcttccactcgttctgaatcgaggtttgcagtccgcccaggctacccagtacaccctgcaacggattaccgccacccttcagcaccgctttggcgcccatctcgttgatgctgtcctggagaatgccgcccatcgcctggttcaccagctgctgaccgtcggcacgcacctgatcgatcgccttataatggaacgtcaggccatcagagcgcgtctcgataatacggttcatctgctctttcagctgtttatccagcttcgtcaggcgggtgcgcatattgctgctctcccccacctctttggtgatgattttatccagcgccacgcggctcttttcaacgcgggtcagcgcgccatcgttgatccagggcagcgcggtacgcaactcggcctggtagtccatcgcctgctcgcgctgggcggccgtcaggttttgcggtttgccgttaaaggtcacgttgccatccggcgtaatcaccagattgccattctcgcccttaacctgcacggtttgcggactcagcaccacgtcatcacgcggggtgacgctacatttatactccgcatgggcggtggttccgattgccagtaaagcaacagccagcaacgttttgcgcatctttaacactccctcagacaaaatgggccagctaatgctggcccgttcttgctttattagtcccaccaaacgtcgaaaagttcgctaacgcggacatcttccagtttgtggtcttcaagccatttgcgtaccagcgcctgatgctcttcggtgcatttccccacttcctgggtgcaaatcagaccttcccacgccagatagccgctaccgtcgaaggccagcttgtttggctcgatcacctcgttgatgaacgcatcaacgtcctgatcgatctgctcaacgctggtgccttccgggaaacgccaggcaacggagaaacccacttcctggaattcttcgatgtgcatctttttacgcagacgacggctacgattctttgccattatttcaccctctcgaacattaagtcccatacgccgtgaccaagacgatggccacgctgttcaaattttgtcaccggacgtgaatccggacgcggtacgtagtcgttgctttcagactgatttttatacccgtccagggacgacatcacttccagcatatgttccgcataaggttcccagtcggttgccatgtggaaaacgccgcccaacttgagcttacttttcaccagctcggcaaacggcgcctgaacgatacggcgtttattatgacgcgctttgtgccatgggtcagggaaaaagagctgaaccatgttcaaagaattgtcaggaatcattttgtgcagcacttccaccgcgtcgtgacacatgacgcgcaggttctcaacgccctcttcgtgggccgttgccaggcacgcaccgacgcccggcgagtgtacttcgataccgaggaagttctgctccgggcgcgcttttgccatggtcaccagcgaggtgcccatgccaaaaccaatctccagcgtcactggcgcgtcgcggccaaacaggtcggtgaagtcgagcggttgctcgctgaactcaacgcccatcaccggccagtagttgtccagcgcgtgttgctgcccttttgtcaggcgcccctgacggcggacaaagctgcgaatacggcgcagcgggcgaccgttttcatcaaattccggtgaaatgacgtcgtttttcataaaagagttgtctgcttgtgagaatgttcgggaaacgggcattatccaaagttaaggcttctatgcaagcatgggaaagatccggtttacagcagattgacgctgtgctgcaatctgcgtccctgattaagcgaatcgatgaccatgcaagcctctcaattttcagcccaggtgctggactggtacgacaaatacgggcgtaaaaccctgctctggcaaattgaaaaaacgccttacaaagtatggctctccgaggtgatgttgcaacaaacgcaggtcgcgacggtcattccttacttcgagcgttttatggcgcgcttcccgacaatcaccgatctggccaacgcgccgctggacgaggtactgcacctgtggacaggcctcggctattacgcccgcgcgcgcaacctgcacaaagccgcacagcaggtcgccacccgccacaacggtaaatttccggagacctttgacgaggtggcggatttgcccggcgtcgggcgttcaaccgcaggcgcaatcctctccctctctttaggcaaacatttccctattctcgacggcaacgtcaagcgcgtgctcgcacgctgctacgccatagatggatggccgggcaagaaagaggttgagaaacgcctgtgggagatcagtgaagcggtcactccggcgaaaggggtggcgcgttttaaccaggcgatgatggatctgggcgcgatggtctgcacccgttcaaaaccgaagtgcgaactttgcccggtaaacaacctctgcatggcctatgcgaaccacacctgggcgcagtatccggggaaaaaaccgaagcagacgcnnnnnnnnnnnnnnnnnnnnnnnnnnnnnnnnnnnnnnnnnnnnnnnnnnnnnnnnnnnnnnnnnnnnnnnnnnnnnnnnnnnnnnnnnnnnnnnnnnnnnnnnnnnnnnnnnnnnnnnnnnnnnnnnnnnnnnnnnnnnnnnnnnnnnnnnnnnnnnnnnnnnnnnnnnnnnnnnnnnnnnnnnnnnnnnnnnnnnnnnnnnnnnnnnnnnnnnnnnnnnnnnnnnnnnnnnnnnnnnnnnnnnnnnnnnnnnnnnnnnnnnnnnnnnnnnnnnnnnnnnnnnnnnnnnnnnnnnnnnnnnnnnnnnnnnnnnnnnnnnnnnnnnnnnnnnnnnnnnnnnnnnnnnnnnnnnnnnnnnnnnnnnnnnnnnnnnnnnnnnnnnnnnnnnnnnnnnnnnnnnnnnnnnnnnnnnnnnnnnnnnnnnnnnnnnnnnnnnnnnnnnnnnnnnnnnnnnnncatggcgacgaggtgtttctcgctcagcgcccgccgagtggcctgtggggtggtctatactgcttcccacagtttgaggatgaagcctcacttcgggcatggcttgaacagcgcggcattgcggccgataccctgacgcaactcaacgcgttccgtcataccttcagccatttccatctggatattgtgccgatgtggcttcccgtgtcctcattcacgtcgtgcatggatgaaggcaacgctctctggtataacttagcgcaaccgccatcagtcgggctggcggctcccgtggagcgcctgttacagcaattacgtgtcggtgcaatggtttagcatcggcaagacaaagaggaatgagtatggccagaaccattttttgtactttcctacagcgcgacgctgaaggccaggatttccagctctacccgggcgacctgggtaagcgcatttacaacgagatctccaaagaagcctggggacagtggcagaagaagcagaccatgctgatcaacgagaaaaagctcagcatgatgaacccggaacaccgcaaactgctggagcaggagatggtgaacttcctgttcgagggtaaagacgtccatatcgaaggctatacgccaccggaaaaataatactctgcggctgctgcccggcggcgctgcgcttgcacgggcctacggttttgtaggccgggtaagcgcagcgccacccggcaacagcaaccccaaagcaaacacaacacgcactcccggaatgatgaaaaaacttttagcgctagcccttgttgcgccgttgcttgtgtcttgttcttccaaaaaaggcgatgaatacaacgaagcctgggtaaaggacaccaacggttttgacattttgatggggcagtttgcccacaacatcgagaacatatggggatttaacgaagttcttattgccggaccgaaggactacgttaagtacactgacgcctatcagacccgtagccacatcaacttcgatgacggtacgattacggttgaaaccatcgcagggactgaacctgcggcgcatttacgtcaggccatcatcaaaaccctgctgatgggcgacgatccggggtctatcgacctctactctgatgccgatgacatcaccatctccaaagagccgtttctgtatggccaggtcgttgaccagaccggtcagccgatccgctgggaaggccgcgccacgaaatttgccgactacctgctgcaaacgcgcctgaaaagccgcaccaacggcctgaaagtgatctacagcgtcacgatcaacctggtgccgaaccacctcgacaagcgtgcgcataagtatctgggcatggtgcgtcaggcgtcgcgtaagtatggcgtggatgagtcgctgatcctggcgattatgcagaccgagtcctcgttcaacccctacgcggtaagccgttccgacgcgctggggctgatgcaggttgtacagcacagcgccggtaaagacgtgttccgcgcacaggggaaatccggcacgccgagccgcagctacctgttcgatccgcaaagcaacattgataccggtacggcctacctggcgatgctgaacaatgtctacctgggcgggattgataacccaacctcacgccgctatgcggtgatcaccgcctataacggcggggcgggcagcgtgctgcgcgtcttctcaaatgacaaagtgcaggccgcgaacatcatcaacagcatggcgccgggggatgtctactcaaccctcaccacccgccacccgtctgcggaatcacgccgctatctgtataaggtgaatacggcgcagaagaactaccgtcgccgctagtcaacacaccttctcctgcaatgagaaggtgttctgcttcccctctccctgtgggagagggccagggtgagggcatcagaccgcacccatctcatcccacccatacgaaaatgctatttgcatcacaatccagactgcaaattaatgtggattgcatttttttgcgggaggtaacaaaacatatcgttgccaactgatagaattgcatcaaataacaaccctgaatgttcccaaaacaacatatctcccgctcacttgtgaggaaagtaacatgaaccttaagctgcagcttaaaatcttgtcgtttctgcagttctgcctgtggggtagctggctgactacactcggctcctatatgtttgtgacgctcaagttcgatggtgcgtcgatcggtgccgtttacagctcgctgggtattgcggctgtcttcatgccaacgctgctcggtatcgtggcggataaatggctaagcgcgaaatggctgtatatgctttgccacctggtgggtgcggggacgctgtttatggcggccgaagtgaccacgccgggggcgatgttcatggtgatcctgcttaactcgctggcctatatgccaacgcttggcctgatcaacaccatctcctactatcgcctgaaatctgccggtctggatatcgtcaccgacttcccgccaatccgtatctggggcaccatcggctttatcatggcgatgtggggcgtgagcttcgcgggcttcgagctgagccatatgcagctctacatcggcgcggcgctctccgtactgctggcgctgttcaccctgacactgcccaccattccggtatctaatcagcagaaaaaccagagctggagcaccatgcttggcctggacgccttcgcactgtttaaaaacaagcgcatggcgatcttctttatcttctccatgctgctgggcgcggaactgcaaatcaccaacatgttcggtaataccttcctgcacagcttcgataacgatccgctgtttgccgggagctttatcgtcgaacacgcgtcggtgatgatgtccatctcgcagatctccgagacgctgttcatcctgaccatcccgttcttcctgagccgctacggtatcaagaacgtcatgctgatcagtatcgccgcctggatgttgcgcttcggtctgttcgcctatggcgacccgagcgcgttcggcaccgtgctgctggttctgtcgatgattgtttacggctgtgccttcgacttcttcaacatctccggctcggtgtttgtggaaaaagaggtgaagcctgaaatccgcgccagtgcgcagggcatgttcctgatgatgaccaacggcttcggctgtattctgggcggcgtggtgagcggcaaagtggttgagatgtataccactaacggcatcaccaactggcaaccagtgtggctgatcttcgccgggtactcgctggtgctgttcttcgcgttcatcgcgctgttcaagtacaagcacgtgcgcgagccgcacggtgcgcagccgatcgcgcattgattgttgtgcccggtggcgctgcgcttaccgggcctggaaaaccagaccgtaggccgggtaaggcgtagccgccacccggctattttattccagaaagcacccaccccaccgacagcaaatccgcgctgccgcccgggctcaggttgcgttcaatcaatgccttatccatcttcagcaacgcctcgcagtcccagccgttagccagcagttcccgcgcgtagccctgaacgtagcgcagcccctcaatgccgccgcgcgaaacgagattgctgtcctgatttaccgccatcaggcgcaacagcaggccgtgaagcgactgaccgttccacgcatccaaagccttacgcaccgtggcaaagccgctctccgcctcgccacgcgcgccggttaaaccgtacagctgaaactgccgctcccccgccgttgcctgcccgctgcgcctggccagctcccgcgccaccagcccacgacagatgttacttacctcacaacagaggctatccgcagagatatttttcacacgcccggcggcgaagcagagcaaaccgagggcaaaaataccgcccttgtgggtatttaccccgcccgtggcggcgtacattgcctgctcgcaggccattcccattgggcggagaatccgcaactgccgatcggcaggtttggccgcatgtgcttcccccagttccgcaaaccgggcaaaccacggcgtaatcgccataatgctgcggacaaacaaggcatggtccatatcgcgatgggagccgttattgagcctgtccaccagccccggttttggcgtcagctccagctcctgccacagcgcctctgcggcaagcgcagggagatcaaccgggcgcggttcagtcgcgagcaaaccagtcatcgatcatcttctccacgcgggaaaccacctgctcaacggggtgattgcgcgaacgggaacaggcatgagcgggctcgtcacagataaggcagcgtctgagattcgcccccagcgactgacgcccgacgtggccgttttcagggcagatcacatccagatcccacagcctgccgagtgggtgcgtctgctccagttctgcacagtgcgccttaatttccgccgccggatgcgcgatgcaccacaaggcttcaggtccggtgggtagccacagcaccttacggtccagcacctgccagcggttttcccacagcagctggtcgcacatttgcagcgccacgcccatggtgttgcgatagcgaaggctgtctttgatttccccgggcgtaaccagcgtgagggagatcaccggttgttgatagtgcgcaagcatgtcagcctggcgcgctgcgcggcgctctttcgccgccagcagttcgtccaggctgacacccgtccgcacgggtgtcgcaatcgtcacacttcctcctttacctgtcgcacggtgtcgatcacgctgccgtcgcggtagcggatcaccccgacgattttgtcggtgaactcaatcggtttcggtacgcctgtcaacgaaatcgctcgttcatacagcgcgttgatatctacaaccttcagccctgcttccatgagtcgttcgcggatctccgggcgcgccgggttgaccgcaataccgtggtcggtgaccagcacgtcaatgctctcccccggcgtgaggcgggtggtaacgcgcttcacgacggtcgggatgcggcttcgcagcagcggcgcgaccacaatggtcaggttggctgccgccgccacgtcgcagtgtccgccggatgcgccgcgcatcacgccatcggagccggtgatgacattgacgttaaagtcgacgtcgatttccagggcgctgaggatcaccacgtcgagctggtcgcagcttgccgccttgctgccggggttggcgtagacgttggtggagatctccacgtggttcgggttgcgcgccagcgaggccgctgcctggccgtcaaagcactgggtgtcgagcagcgtttcgatgagtcccttctcgtgcagatccaccaggctgccggtgatgccgccaagggcgaagcgcgccttcacgccgctgcgctccatcttctcttccataaaacgggtgcaggcggtggccgctgcgccggaaccggtctgcatcgagaagcctggtttgaaatagccagagtgttcaatcacgtccgccgcatagcgggcgatcatcagctcgcgcgggttgctggtgacgcgcgccgcgccgacgctgattttcgccgggtcgcccacgctctccacctgcacgatgtagtccacctggtcctgcaccaggctggcgggcatattggggaatggcaccagttcttccgtcagcagcaccaccttacgggcaaagtgcgcgtccaccatggcgtagcccagcgaaccgcagcacgatttgccgtgcgtcccgttggcgttgccaaactcatcgctgcacggcacgccgagaaacgccacgtcgatattcagctcgccgtcctggagcagcttcacgcgcccgccgtgggagtgaatttgtaccggctcgtccattagcccgtgggagatggcatccgccagcctgccgcgcatgccggaggtgtaaatccgggtgatgacgccactctcgatatgctcgatcagcgcgtcattgcaggtcatcagcgagctggaagccagggtcagatttttgaagcccatccgcgccagcagcgccacgacggtgttgatcacccggtcgccttcgcgaaaggcatggtggaaggagatggtcatcccgtcctgcaagccgctgcgcttaaccgcctcttcaattgaggcgcagagcttgcggctgtgcttcgcctcgctgtccgccagccacggcgtcgcgctgtgggcggtatcaaagggtttcagatcccgcagatgggggaaatttacatggagaagttctgtctgattcattatgtcatccttaccgacgcacgccagaggccgccgcgcgctccagcaccacctgcgcgtggttaataatcggtgcatccaccattttgccgttgagcgacaccacgcccaggccgttacgctcgccctcttctgccgcctcaatcacccttttggcgtgatccacctcttcctgagtcggggcgtaggcgttgtgcagcaggtctatctggcgcgggttaatcagcgatttgccgttgaagcccatcttgcggatcaggtcgacctcgcgcaggaacccggcttcgtcgttaacgtcggaccacaccacgtcgaaggcgtcgataccggcggcgcgtgcggcgtgcagcacggcgcagcgggcatagaacagctcggtgccgtcgccgcgctcggtctgcatgtccatcacgtagtcaaaggcggccagcgcgatgccgatcaggcgcggggagctgcgggcaatcgccacggcgttgatgacgccaatggccgattcaatcgccgccatcacgcgggtggaacccacatcacgcccgcactccttctcgatacgctcgaggtggccttccagctcgtaaatatcgtccggggtgtcggttttcggcaggcgaatcacgtccacgcccgcgcgcacggcggcctccagatccagcaggccaaacggcgtgctcagcgggttaatgcgcaccacggtttcgatatcctgatacattgggtgctgcaacgcgtggaacaccagcatgcgtgcggtgtctttctcgcgcagggccacggcgtcctcaaggtcaaacatgatggagtcggggcggtagataaaggcggtagagagcatggcggcattggcgcctggcaggaacagcatactgcggcggagtttgctcatttcagcgccccccagttgatggcctgttcatcggcggcacgcagaagcgcgctttgcaggcgagcgcggatcacacagtccagcgcccctttgtcttcaataatgattaatccctggtgcacgttcatggcgcgcaatgtgtcgttgaccacctggcgtatttgctcgccaaactgcttaatcacttcactgtggatgacaatctccagctcaccgtgagcgggggcgattttcaccatcaggtcgctggactcctgcgttccggccagcgcctcccttacaatattcatgataaattcctgatagttatgcgacttccgcactcgcacgataatgtgcttcgaggtgcgcgaaggtggagtccgggacaatctcccggatccgggaaaactgctgtgtcttgagtaaacggcgcacttccgaggccgaaatggcgttgccggtggccttgatgcgcggcatctccaccacctcaatatgcgaggccagaaggtcgtgcagcgtctggttgtactggcgggtgatgtcgcagaacggctccgagccgatgaagcggtgcgtgatgcccagcgccggggcgatatagtcccggaagatcagcacgtcgatctcgctccacgcctgctgcactttgccagtctccttcaggaagtaggccggaaacgtggcgcgggagatgatgtactgcgagccttcatgcaccaccacgttcggcagatgcgccacgcccgcacgcaccatctcaatgcgcgcgctgaacgggaagaacgaggcgtcttcacgcaccacaaacagatgcagggcatcgcactgcgtcgccgcctgctccaccagatgacgatggccgagggtgaagggattggcgttcatcacgatcgcgcccgttttttccccacacctgcgcttagcgcgcagggatcggcagtagcgcgcgatcccctgcggagtgttctccattagcaccgcgttgttcccgctctgggcaatcggccagaaaccgctgcggccaaagcgctccttattgcacggacgggtgcagaggaagaggtgaaaatggccgcgctccagcgccgcgttttccacctctgccagcagacgcgcgctgaggttttccccacgaagctgctcgttgaccgccacgcatttgatgacgttggcagccagcccggcgcaacccaccagctgcgcgccggaccaggcttcgacaaagagcgtgatgtcgttgtccaggccaaggccgctgtctgccagcaggtagcggatctggcttaagcgttccgggtgtttcgccacaacggtgtgccgaaaatcaatgggttgcgattgcatgctgccgccttactcagtgcgctgccgcgagcccgacggctggcgcttccacgatcacgttgctcagatgaccgatatgctcgatctccacctcaatgcgatccccctccttcataaacagcggcgggttgcgctttttacccacgccaccaggcgagccggtgatgatcacgtcgcccgggctgagacgggtgaaggtgctgatatactcgatcagttccgccaccttgtggatcatgctgctggtgttgtcctcctgcaccatgcggccgttcagccaggtgcggatcgccaggctgtgcgggtccgggatctcatccgccgtcgccatccacgggccgaacgccccggtctggcgccagtttttcccggcggtgaaccaggtgtgctgccagtcgcgggcggagccgtccatgtaacagctgtagcccgccacgtggcgcagggcgtcgtcgcggctgatgttctccccgcctttgccgatgatcaccgccagctcgccttcgtagtcgaactcgctggagtggcgcggcttcagcaccggctcgttgtggccggtctgtgaatccgggaagcggacaaacagcgtcggggccgggttgtgctggtcaaactccttgcgcttgtcggcatagttcatgcccacgcagaggattttttccggctggacaatcaccggtaagaaggtgatggcgttcagcggtacatccaccgcgtcgttcagaaaacgggtggcctgcgccagcccgttcccctgcaacagcgctttaaggtcgccatagcggtcgcccaggcggcggcccaaatcaatcacgccttcggcctgtacgatgccgtagctgcgttttccctggtataaaaagcttgcgagtttcattgttctttcctgaaaacttaaacgaggaagttgcccagaatcagcagtgagacagagacgttaatcgcgccgccgatacgggtagcaatctgggcgaatggcatcaggctcatgcggttgcctgcggtcaggatcgccacgtcaccggtgccaccctgcccgctctgacagcaggagacgatggcgacatcaatcgggtgcataccaatctttttgccaacgaagaatccggtcgccaccagcgcggaaacggtgctgacaatcaccagcaggttgctgacggtgaacgccgccaccagttcatgccatggggtgatcgccacgccgacagcgaagaggattgggtaggtcacggaggtctggaagaatttgtacaccacctgggaaccctccagcagacgcggagaggcgccgttgcagagcttcaccagcaccgccataaacaacatgcccaccggcgctggcagaccaatcagcttgtgaccgagcatgcccagcatgtacagcagcaccgccagcagcgcgcccgaggcgattgtcgtcacgtccgctttgccggagaacgcaggttgggaaacagtggcatcagcgttggcgcgattcggcatcagctggccttcaccggtcaggtgcgggtagcgtttaccgagctggttgaggcagccggagataatgatcgccgtcaggccgccgagcatcaccatcggcagcacgcggccgagcgccacgccctgatccatatgcagcagggtggcatagccgatagagagcgggatcgccccttccccgacgccgcccgccatgatcggcagaatgataaagaagaagatctggaacggctcgaggcccagcgccagcccaacacccatgccgacaatcatgccgacgatttcaccgcacagcatcgggaagaagatgcgcaggaagccctggatcagcacggtgcggttcatactcatgatgctgccgacgataatgcagcagatatagaggtagagaatattggtggatttatagaatttggtcgtggactcaaccaccacgtccggcagcaggccgtaatagaccagcgcggaagggataaaggtggcgcaaattgccgccgcaccgagcttgccgacaatcggcaggcgtttgccgaactcaccgcaggcaaagccgaagaaggccagcgtggccaccatgaccacaatgtcgctcggcagttttccgcccaggcaatcaatcgcaatcagcgcgcccgccagaacgaacagcggcagaggaataatgccgattttccaggtatccataatatgccaccagcgctctttgagcgatggccgctgaatatcaatcgggtcgtgggtaacagagaatgaatcgtcagttgtgctcataataagccccttagttattttgtgcgttcagcttagagtcacaaaggcttactttatgtgagggatggcatattaaaagcgaagttttaatggacgctatggttttaatggtttcttttatttaatgtgatttacgccttatttattgccgtggtttttatggtttcttttcttaactgaacaaagaaataacatttattcatttaaccttaagaggatgagactttcggaaaaatcttttacaggctgcgctgtgcaagggatcacaagttttcggcaaagcgggcaccctggctttaaaagatgatatattcagccgacctgttgatatctcgcgtgatagttatgaaagtatcgtttcagatcaagctgtttatttcgctggtcgcctttttctcagtgctgttcgcattactgggcggatattattatgtcgatgtcggcaggcagctttatcaggaaatgagcgcgcgcgcaaaaatacaggccgaagaaattgcgcttattcctaccctgcgaaaagaagtcgaacaaaaggatatcctgggtatccatgactttatgcagaaaatagccgcccgcagcgacgccagttttattgtgattggtgacaataaagggctgcatcttttccactccgtgtttgccgaccgggtaggcaaaacgctggttggcggagataacgacgaggtattacacggcaaaagcaccatcaccattcgcaagggcgggttaggcatttcgctgcgcagcaaagcgcccatttttaatgatgccgggcaggtggtggggattgtttcggtaggctatctcacgagctatctggacaccatcaccgtcagcaaggtggttaatatcctgattgccgccgtgctgctgcttatcgccctgtttattttctcctggttcttcacccgcagcatcaagaagcagatattctctctggagccgcgcgaaatcggcctgctggtgcgccagcaaaaggcgatgatggaatccatttatgaaggggtgattgccatcgacgacgatctccgcattgaggtgatcaaccaggcggcgcgtaaattattaggcttacgccagcccgcccgcgaactgcgaggtcaactcatcagccaggtgatcgcgcccgtcccgttcttcaacgcgcaaaccatgcttgcgaaagacacccacgatgagatctgtcgctttaacgatctcacagttattgccagccgggtgcggatcatgctggaagatgcgttgcagggctgggtgatcacctttcgcgatcgcaacgagatcgactcgctcagcgcccagctcagccaggtgaagcgctacgttgataacctgcgcatcatgcgccatgaacagctgaaccgcatgactacgctgtccggcctgctgcatatgggccgttatgacgaagcgattcgctacatacaggcgcagtcggaacacgctcaggagctgctggactttatctcgtcccgctttagctctccgacgctgtgtggtttgctgcttggaaaggccgcccgcgcgcgtgaaaaaggcgttgagctgagtttcgacccggcctgccgggtggataaaccgttcctgccgctgctcgaatcggaacttatctcgatcatcgggaacttgctggataacgccattgaagcgacccagcgtgcaccgctcccgcatgccccggtggacgtgctgataaagctgaacgagcaggaactgattattgaagtcgccgaccagggcgtcggcatcacaccggagatccgcgaccggatctttgagcgcggcatcaccaccaaaacgcgcggcgatcatggtattggcctgtatctgattgaaagctatgtcacacaggctggcggtgcaattgaagttgccgataacaccccacgcggtgccattttctcactgtttattcccgccacgggaacggcccggcaccccgtacaggaactggaagataccgactatgcaacatgaacttatcgacgtactgattgttgaagacgagaacgaactggcgcaactgcacgcggagcttatcggtaaacatccgcgcctgaggctggtggggattgccgcgtcgctggccgacgcgcaggtacaactggagagcaaacagccgaagctgatgctgctggataactacctgccggacggcaaaggcatcacccttatcagcaacccgatgctcacccgcgccaactgctcggtgattttcatcaccgccgccagcgatatggacacctgtagccaggcaattcgtaacggcgcgttcgactacatcctcaagccggtttcctggaagcgcctgagccagtcgctggaacgttttgtgcagtttgccgaacagcagcgcgtctggaagatcgtcgaccagcagaacgtagattcactctatcaattgcaggcgaaaaactatcgcctggacaacggcagcaaagggatagaggagaacacgctggcgcgggtgcaaatgctgtttaacaacaaggcggcgcactgttttacggtggatgaggtggtgagcgagacgggcctgagtaaaaccaccacccggcgctatctggaacactgcgtggaggtgggttttctgacggtggagatgctgtacgggaagattgggcatccgagaaggatgtaccgccgcgcagaagcctgacgcagtattgtaggcccggtaagcttgcgccgccgggcactcgccgggtggcgctaacgcttacccggcctacattcagacattcaatacgtatccatacagccgcttaatcccgtccgcatctttctcgctgtaaacgccctgcaactctggcgagaaacccggcagcatattaatgccctcttccagcgccaggaaatagcgctgtactgctccaccccagacttccccgggcaccacacacagcacgcccggcgggtatggcagcgcaccttcggcggcaatgcgtccttcggcgtcacgaatacgcaccagttcgacgttcccgcgaatgtactcctggttggcatcctgcgggttcatcaccacggcaggcaggctctcctgacggaacatcgccttctgtaaatccttcacgttaaagctgacgtagagatcgtgcatctcctggcacagctgacggatcgtgtagtcgcggtaacgcaccgggtatttctgatagatagtcggaagcacatccgcgagcggtgtgtcgtcttcaatatgctgttcaaactgccccagcattgccacgagctgcattagcttctccgcgctctcggctggcgtcagcaggaacaggatggagttgagatcgcacttctccggcacaatgccgttctcgcgcaggtagtgggcgagaatggtcgccggaatgccgaaatcggtatagtgacctgtttcagcatcaatgcccggcgtggtcagcagcagcttgcacggatcgacgaaatactgctcgcgggcatagccttcaaaaccgtgccattttgcacccggttcaaaactaaagaagcgacgctcgctggcgatagcctgtgtggggtgatcctgccatggccgccccgccaccaccggcgggataaacggtttgatcatattgcagttggcgatgatggccttgcgtgcttcaatgcccagctcgacgcactccgcccacagcctgcgtccgctctcgccctcgtggatcttggcgttcacgtccagcgcagcaaacagcgggtaaaacgggctggtggaggcatgcagcatgaacgcattgttcaaccgcttgtgcgggcagaagcgcgactgaccgcgaatatggttatcctttttatggatctgcgacgtttgcgagaacccggcctgctgcttgtggaccgactgggtcacgaaaattcccggatcgttctcgttcagttccagcagaagcggagacgtttccgccatcatcgggataaattgctcgtagccgacccaggcggagtcaaagaggatgtagtcgcaaaggtgaccgatcttgtcgatcacctgacgggcgttgtagatcgtgccatcgtaggtgccgagctgaatgatcgccagacggaacgggcgcgcctcggcggctttctgcggcgcgacgtcacggatcagttcccgcagccaggcctcatcaaagcagtgttcatcaatcccgccgataaaaccaaacggattacgggctgcctcaagatagacaggcgttgccccggcctggatcagcgctccatgatggttggacttgtggttgttacgatcgaacagcaccagatcgccacgggtcagcagcgcattggtcaccactttattggccgccgacgtgccgttcagcacgaagtaggttttatccgcgttgaacactttcgccgcgaacttttgcgcgtgcttggcggagccttcgtggatcagcagatcgcccagcttaacgtcggcgttgcacatgtcggcgcgaaaaacgttctcaccgaagaaatcatagaactgccgccccgccgggtgttttttgaaaaaggcaccgtgctggtgacccggacaggcaaaggtgctgtttcccatcgccacatactggctcagggtgtcaaaaaagggtggcagcaggttctcttcataccggcaggcggcagattccagttccagcaattcctgtgctttacctgagatgatcgccgtgacaccctctggcatctctcctggctctgttgagaacataaataccggtagctgaaagcccgtacgcttcagcaatgcgagaatgccgctgtagctttcaacaaccgtaatgacgactgccgccacatcggtgaaatcagtgttatccagcataactttttcgcgatgcgtagaaactttggataccagctcacggctgacggcaattttcatggttttcataagcgcaaacaccctcaccgaacggtgagacaggaaggagaaaattcgcgcaatcatgtcaccttttattttcaggtgcaagaaggaatcagtatgcgttacgcctcccaaagctaagcgtaatcagggacgaacgtgccataatcatgcaatgccagtgcttaaataacaggagttaaacgtggtaattggaccctttatcaatgcgggagccgtattgctgggcggtgtacttggggcagtattaagtcagcgcctgccggagcgtattcgcgtctccatgccttctatttttggcctggcgtcgttagggattggtatccttttagtggtgaaatgcgccaacctgccggtgatggtactggcgacgctgctcggcgcgctcatcggcgagttttgctatctggaaaaaggtattaatcacgcggtaggcaaagccaaaaatctgattgcccgaccgggcaaggcaaagcacggcacgcacgagtcgtttattcagaactacgttgcgatcattattctgttctgcgccagcggcacggggatattcggttcgatgcaggaagggatgaccggcgatcccagcatattgattgcgaaagcgtttctggatttctttactgccaccatttttgccaccaccctcggcatcgccgtcgccgcgatttgtgtgcctatgttgcttattcagctggcgctggccacctgcgccacgctgatcctgccgctgacaacgccagcgatgatggcagactttaccgccgtcggcggcctgttgctgctggcgacagggctgcgcatctgtggcattaagatgtttgcagtggtgaacatgctccctgccctgctgctcgcgatgccgctttccgcgctctggacgcactttttcgcttaagtttgcgacgaaatggtgagagagtgtgcagtctgctccgaaagcaacaaatttcgttgacgccggagggaggatcgggtttaatgcgccccgttgcccggatagctcagtcggtagagcaggggattgaaaatccccgtgtccttggttcgattccgagtccgggcaccaaaatttatattaacggacctccacggaggtccgtttttgcattctgaacccgccagaatcgacacttctgcattcccttaatgacaccccgaccactgcgtcagcagcgcatgcagtttagccggctcaagaggcttgcgaagcaccaggtaaccctcctgctccgcctccagcagaaccggtgaattaaattcgccgctgactatcgcgccgctcatatccggcagacggtcaaaaagcgctttcaggatgtcgaagccgctttcgcccgatcgcaggcgctggtcgcacagcacggcgaacggcgtaaagccgtcgtcgatgatggcaaacgcttcttcagcggaggccgcacagcgtacgtcgattccccagacgctcatcaggctctcccaggcagacgtcaccagcgggtcgtcatcgacgaccaggcaggaaccgtgcagcggcgcatagcgtaccggcgtggcggtgttgtcagcggcgggcggggtgtccagcacgctatcttcgcctgcatattggataaagcgcatccagaagcgtgagcctttaccttcaatggattgcatcccgtattttaccttcatgagcttggcacaacgggcaacgacggccagccccagcccgtgtccggcgctgtcgatcttccatgccagctcggggcggtagtaaggtgagaagattttgcccttctcttcatcggcgataccgactcccgtgtcccacacctccaccatacactcgtcaccgcgcggtcggatggcgaccagcaccccgccctggagcgtgtagcgaagggcgttttgaatcaggttaatcagggactgtcgcaccagcagcggatcgcccatcacgtcgatacggcgtttaggccgccggatacacagcctaagcgcgcggctgttggcctcttcacgaaacagcgtgatgaccgagtcgagcagagcaccgatatccactttggtcggggcagagaggacattcccggattctattttgctcagatcgagcagagaattgagcattaaatgcaccgagcgaacgctctgctgaaggtcaaggagttgcggcgtcaggctgtcgtcccggtttcggtggaggatggcttcgatcagaaagcccattgcgtgtacgggctggcgcagatcgtgactggcggtggtcagaaactgatttttatccagcagtgcctgctccgcgtcctctttggcctgacgaaactgttccgcaaggcgtgagcttttttcctcaagcagcgcttgctgaataaagaacgcatgggaagttaacgcatggcggtaaatcgcgaagccgtaaagcagattcagcatgagcacgatgaacatcaactcatccagccgccagataataccgaggttcagcaccccccaggaggcgaagaaaaaacgcgtaaaggtactgatgacaggcgtcagatgcgtcgcattggcggcgacgatggcggcaatgctgatattaagtaacaggaaaaagtcaaaattctgcgtctgtggcgtaattaaatagagtgatgaaattcccagcccgtgaataaaggcaatattattaatacgcggaagccagcgtcgcagaacgtccctttcaccgttttctttcgcttcacgctgatagcgtcggtgcaatattcgtatcgccacggcacatagcagataaataattatccagataatcgttgggccgaggtcgtccccaagcatataaatccagatggcgaaaggaataccaacaaagggcactgcactaaagctaaataccagccgcagaaaggtgttgtttagcaaacggatctgcgccggaggagagataccatcattttgtaagctctgaaaaaacctcattccgacggttcctgcttgccatgcagaagcgtgatggcttcgacccggctgttaacgcctatctttttcaatatattgctgatgtgttctttgaccgtgggctcagaaattgaaagctgggcggcgatgcgtttatttggcaggccgcgcataatcatatttaacacgtctatttgtcgcggcgttaagttaaatttacttaacttctcattattcgtcttaacggaaatttcgtttccctcaggaaaccatgtctgattatcagtgagtgcgaaaacggcccgcgagaacatctcaggtggctcgcttttcaatacaaaaccgtgtcccccggcggcattaactttgcgccagatatcattattgtcatccccgctgaccaccaggagtcgtacctgtgggtaaagttgctttacttctttgagtaatttcagggccgttccggaagagagccaaaaatcgattacgagcaaacgtggcgggccatgatccctaatttggcggtagcaatcatcctcattcgtcaccacacacgcctgcttaaactggcaatgtgtaatcagaaaattggcgatgccgcttgctaccaatggatggtcatcaacgactaacgcataattctgtcccaaaggagcctccttttaccttcgcatatcttagagtacagatgaattattatctacccaccctactttaggagggttttttcgattaggaaagagaaatatattattcgctgatttgggtaaaagaaaacataaatacaatcagtgaaattaactggttggatatcaaggataatttatgaaaaaaccactaatcgttttaaccgttacgttgatgctagccggttgttccacgttgaaaaccgatcaggctattccactcctacaggcggagaccgctaaaatgctgggactgggctcatcggatgaaataaccgtatccaacgttaatggcgcccagccggacgcactgggaggacaaaaactctcttatcgcgccacgacagaaaaagggcgtattttcgattgttcatcgatgatgatgccgggaattttaggatctgcaccgacgctgagcgcgccaacctgtacaccagttgtcacacataaataattagcaccgcattaaaaggcgtactgaaataacgccttttacgttatctgacgtatctgagttttcatataaaaacgatgttcctgacatcatgctaatgagtacggagatagcccgtgaataactctacatcacattctttagcggttaagacaccgctttccagactttacctcgctctattttccgcgccgctgttactttttttacctgccgatgtcgcgcgtgcagccgatgccttttttgatggcgagtcgcgtattaccgaaacgctgggttacaccggagatgtttatgttggacgtaaccaacgcggaaacctgctgatcgataatggcaaaatcaccgcctataacatcaatatcggtcggctgttcgacggcaaaatttatgaaagcgtggtcacggtccgtgggccagacgctgagcttaacgcggtgaacgatcggtacgtcctgcgcggcgacctgaatcttggcctcggcaccctgcgagtcgaagagggcgcgctggcgagcgcaaaggagatcgttgtcggcaccacccgcggctacgacagccacctaatcgccacgggtgccggctctcgtgtgaccagtaattttctcagtgtaggcaccgatctgggcgcacgctccacgcttgcgattgaagacggcgcgtcgctcagcaccgcttacgatgcgcgcatcggcaacggtaccgggccgggtgaaaccgacacgctgagcccaaaagccatcgtcacggggagcgggtcacagtggaacgttggccgtacgttgacgctttatggcgacctggacgtgctgaacggcggggtggttaacgttggcggcgtgcaggtggcgggcgtctccggcgcagggaaaactgccgaactggttattgcgggcaaggactcgcgctttaccagcggcagcagcgtgagcgtgggcgattacggcaatggcgtgctgtctgtgattgacggcggttcattttccgctggcagcaatgcgctgatcgtggggacatcgggttccggctcgaaccggggtgcgctcatcatcggcagccgcggcaatatggacaccggcacgggtttaactgagccaacgcttggcacggcgggcggcgcaggtaccctcgatgcgaagacggcaatcagcctgcgtggcggactgttcggcagctatgtctacttcaaccataccgacggaaattacctcttcagcaacacgatgagcggtgaaggtgatgtgatcaatacctccgggcagacgacgctgaacggcgatctttccgcactcaaggcgaacgtaaccgcgcggggcggtaaagtcatcattgccagcaatattaatacccagccagaagacgatatctttgacgtccagacccttagcgcggagaacggcggtacgctgatcctcaacgcgacggcgggttcagacgtcagcaacggggtgggttacagcagtgccgcgtcaatcaagtccggcggaacgctgggcggcaacgggacgctgggccagaccgagatcctgtccggcggacatatctcgcccggcgacggcaatatcggtacgttgacgctgaaacgctatctgaactttatcggcgaatccttctatgacgtcgatatcgcagcagatggccgcagcgaccagctactggtatcgggcaaaaccaccatcagcaatcaggctaaggtacaggtcaccgcgctggatccgcaaaccagctataaaacgggccaaagctaccgcattttgacctccgacgggggaatcgacggtgagttcgccggagcgatctccaaatccgcattcctcgacgtggcgcttaagcaaagcaccaacgccgtcgatctgaccatcgcgcagaaagagaccggtggcgagaatcctggaggagaaaaccccggaggagaaaaccccggaggcgaaaaccctggcggtgagaatcctggcggtgaaaaccccggaggcgaaaatcctggtggtgaaaacccgggcggtgagaatcctggcggtgaaaacccgggcagcggcaagccgggcattttccagaccgtggcccaaagcagcaaccagtggaataccgcaggcgcgctctccacgctgacgcaaagcggcccgtcgctggcgctgtataactcgctgcttctgctgagcgcaccggaagcgcgcgaggcgttcaaccagctttctggtgaagtttatccgtcaatgcagtccaacctgatcgctggcagcacgcaggtgtttaacgtgttaaaccagcggatgcagcgcgcgtttgataacgacagcctgccgataccaccgttagccatgtcgctggtgcagcagccggagccgcaaaacaatggcgtctggggccagaccttcagctcctggagccgaaacagcggcgacggtaacgtgggcaagctggacggcaacaccaccggcttcctgctgggggcagatcgcaaactggcggaccataacgtgcgtgtcggcggctacttcggctacagccggggtgattatgacgtcgacagccgtcgctcctcaacggataccgacaactatcaccttggtctgtatgcggcgggtcaacaggatgcgttctcccttcgcggcgcgctgggttacacctggcacaagatcgaaggcgagcgcaatgttgatttcagcggcttctcggatcggctgaagtcagattacgacgcgaactccctgctggcgttcaccgaagcgggctaccgtttcggccagccagacaggaatattgagccgttcgtcaatttatcgtacatccggctgcataccgacagcttcagggaagacggcggtgccgctgcgctgagcgtccgtaacgaaacgatgaacaccttctatacgacactcgggttgcgcggtgtgaccgagttgccgaagcacgttaacctctacggttcgttgggctggcagcacgcctatggcgataagaatacctcttcgcgcatggcgtttgcgggcagcgacgcgttcattactcagggacaggccgtggatgaggatgtgatggtcggtgatatcggcgtgagcgtaaagctgtcgcgtgctgcgacgctggatgtgggttaccagggacaatatggtgcggatacccgcgtcaactcggttaacgccaatctgcgctggtcgttctgaattatttccattaaaagaacccgccctcgtggcgggtttctgcttttggcttctgacgaagctagggatcgttcccaaccgcgtccagcagtttgtttttaaagataaacaaacacgcctcgttgaagttacctgctcctaaccgctccgacagcacagttcgcttgcgatagaggcttttaaccgacatatccagcttatctgcaatctcttccattgacctccctgccttcagcaacctgatcattatcgcttcgtgtcgactcagccgtaagttaagcagccatttggttgtcagacgcctgcctttcatatcaagcaccagattgaataacgacgccatatccggagccgtaagcgacgtgttcataaacagcttcatactgagaagatcctcctctcgaggacgcatatccagcataacgcagcagatcgtttttctcgttctggccggatggcgtatcaggtaatcatataaacggagcggcgtacggctatcaatcagtacagtatattcatttgcgtcggtatcaaatatgtttctgtctatcgaactgaggcaaattatatccgggaaaaatagccgcatccccctgacaaggaaacaatcctgagtcactaacactattgaagtcgccactaaccatcccttttagattaaagcaagcccgcctcttaagaaacaagaacgctttcgtttatagcgctttacattaacggaaaatgttttctggctttgatcatccctcaatatgacattggtgagctagactttttgtagactatcactcaatgcctggcgttaattataaataaaaaagaatttcagaaaagtcacttctctgaacattaagaatttttgtcatgaaacttcccaaacatgcaccagaaagtactttaattaactcagcagaacttcatttctaatataaaaaaacaggaagcagcaaaagaaaaaacatttaacatcaatcagttaaaaagaacaatcctgcactgaattatctaaaaaacttacttcttccagaattatctcaaaacctcccagccgcttttcaacttatttatcccccaacatatcgggtgtacattaagcccaatcagaccactgagatgagggctcataattacctttaagtaagtaccccataacgtagcatcattcagatttaatgttctcctttatgccctttaacacagagttaaaaggcggccgtgttatgcaatggattcacgataaacaaatggcaaatagatatggaaagatcgcttagcttcactacgttattcttttatcgcaccacaatattattgctcctgcttttactctttcctgttctggttcaggctgatgaatccgtttatgagcatcagatacaacaggcacgtaacggtaattacgcgctgtttcttgattacctacagcgctatgagcaacagcatgctttaacacccggacaggttgcggactggttacaggtagcctcctgggcaggacgcgatgatgaggttatccgggtctggcagcgttatggtatttatatgccgctgcccgctcgcgccatcgctgctgtcgcccagtccagaagaaaccaaaaagcctggccatccgccttatcgctgtggaaagaggcgctcagccttgcgccagataacgacgattaccgcatcggctatgttaagaccctggccgatgcccgcagagatcgcctcgcgctttcggaagcccggcggctggttaaggacaatccttctcccgcgcaccttgagacgctctcctatgtctggatgcgccagggaaaaaacggggaccggctgctggcggacatgcgtgcactgaacgccgctcccgggaataatgcccttcttcgcgagacgatcgatgcgttaacggaaaatcgggtaagcacgcctgcactctggctgtcgcaaagcgcggcgatgtctcccgcggagcgccgccgccttgagcgtaacgccgcggctgaaagggtacgcctggcggatgtgcctggcagaacggagaaagagcgcctgcggctggcacaaaacgcgttagatcgctatcacgccctgctttcccgctggcaaaacgaaccgcaggcggctgaagacgtcgtccttgcacgtatcgatcggcttggcgccctgtatgcgcagggtaattaccggcaggtcattagcgaatatgaggcgctgacggccgcacagcatccggtaccggactgggccatcggctgggtgatctcggcatatttgcaggagaaaaacaccgtcgccgccttctcgcttgtgcaacgctatccacactacgcctccgatccgcaggatgaggagcatgcgcttttctacgcctggctggatacggggcagtatcagaccgcccgccactacgttgagcgcgagacccgcagcgttccctggacccgctacgatttcggatccccgaccgctcagccgaacgatcggtggctcaccggacagtctctcaaacttaactatttgctggcgaccaacgccctgccggaggccgaaaagctgtcgtatcgtctggcatcaacggcgccgggaaatcaggggttacagattgattatgccgccctgcttcaggccagaggcctgccgcgcgcggccgagcaaaagcttaaacgagcagaggcgcttgaacccgcgaatctggagcttgaaaaacagcaggcttacgtcgcaatggaccttcaggagtggcgccagatggatttactggctgctgacgtaattgctcgcgcccccgccgatcgcagcgcccgtcgcctggacagactcagagcggtccaccatatgtctgagctgcgtctgaacgcgggtaaaggattgcactcagataaccccgtcagcggtagccacgacatgaactgggacgccacgctctatggcccgcccgtggcggataactggcggctgtttgccggcgcccgctatgctcaggggaatttcgacgaaggtaaaggcatcagccgccacctgctgggcggcgttgagtggcgcccccgtgacctcacgctcgaagccgagctctccagcaaccgctatcacggtacaaacaggccgggcgcacggctctcaacaacctacagcctgagtgataactggcaggtcagcggtaacctcgaacgcttgtcacgcgccacacccttacgggcattacgcaatgggatcagcgccaaccggggtgaaggtggggtgcgctggtatcaaaacgagcgacgtgaataccagttcaacgccgccgtcagccgcttctcagaccacaaccgccgtcaggaatacaccctctctgggaaagagcgtctctggcagaccccgaccctgacgctggatctcgaaccggggatcgccgccagtaaaaacagcctgcggaatacgctctattacaacccggcacgggatctgtccgtgacggctgccctgtccgttgaccatgagatgtaccgccactacgacaccctctggagccagcagttcgtggcaggcggcggcagctactggcagaaaaatcagtcacctggcgccattaccctgatgggttacgggcaacgcatccagtggaacaacgttgtcgatactggcgtgatgctgaactgggataagcgcccttacgacggcaaacgcgagagcaatctctccgtcacgttagatgcgactttacgcttttaaggatgaatatgctgaacacacgtttttctgtaagcctgatcgtcatcggctggctctgcctcagcgcgagcctctgcgcgcagccgctctcctttatggcccctgaaaagaggccgcagctggaggccagcaaaccctggccggagaatcagtttctggtcctggcctaccacgacgttgaagatgatgccgccgatcagcgctacctctccgttcgcaccagcgcgttaaacgagcagataagctggcttttgcacaacggctatcacgccatcagcgtgcaggacattctggatgcgcatgaagggaaaaaagcgctgccgccgaaagccgttttgctcagctttgacgacggctacagcagcttttacacccgggtctggcctctgcttcaggcctggaacgttcctgcgctgtgggcgccggtgggcagttgggtggatacgccggcaaatcaaaaagttaacttcggcggtctgatgacgccccgcgatcgctttgccacctgggatatggttcgcgagctcagccagtccccgctgattgagattggctcgcatacctgggcctcgcattacggcattccggccaacccgcagggaagccgtgaacccgccatcgccaaccgttttttcgataacgcgacggggcattacgaaaccgatgaacacttcaaccagcggatcgccgcagacgtacggaaagtcaccgataaaataacccaggtgacgggaaaagcgccgcgtgcctgggtgtggccctatggggctgccaacggtacgtcgctcactatcgcccagaaacagggctatcagttggcctttaccctggaggacgggctgggaaacgtgcgcgacctcggcaacatcccgcgcctgctgatcgccggaaatccgtcgataaaaacctttgccaacacggttagccgcgttcaggagtttgacccggtgcgcgtcatgcatgtcgatctcgattacgtctacgatcacgatccggcccagcagacgaaaaacatcaacaaactggtccagcgggtctacgacatgaaaatcagccatgtgtttctccaggcgttttcggatccgcggggcgacggcaggatcgatgcgctctatttccccaaccgtcggctcccggtccgggccgatctctttaattttgtcgcctggcagctacaaacccgcgcgggagtgaaagtcttcgcgtggatgccggttctctctttcgatctcagtccagccttgccgcgcgtgcagcgccgggatcgtcaaacgggagcgttgaccgtggccgccgagccctatatcaggctctccccctggagtccgcaggttcgccagcaggtgacggagatctatgaagatctggcccgctatgccagcttcaatggcatcttatttcatgacgacgcggtgctgacggacgttgacgatgccggacaggacacgacccgacagaagagtcagcgacttatcggctttacccgcaccctgagccaggcggtgaaaaacatccgtggcccgcagatcaaaaccgcgcggaacatgttcgcgttgcccattctcgagccggaaagcgaggcatggtttgcgcaaaatctcgatgattttctggcggcctacgactggacggtgccgatggcaatgccgctgatggagtccgtcccggcagaagagagcaatgcctggctgacgcgtttagtcaaagccgtcgccgcacgccccggcgcgctgaataaaacgatttttgagctacaggccagggactgggcacagaaaccgcagcgtgccgtagccgatgaacgtctgatggagtggatgcgggtgctccagctgaatggcatcaaaaattacggttattaccccgacgacttcctcaacaaccaacctgatatttcacgtatcagacctgaattttcttcgtactggtatcctgacaatgactgatcgcattatcgccttctctattttgtgtctggtattcgggttgccgttaggcgtagccgcgctatttaccggcgaactgattctggactttgtctttttctggccgctttttatgtccgtgctctgggtaaccggcggcctctatttctggtttcagcttgaacggcactggtcgtgggataacgcaacacccgcccccgccttagccggtgagccgttaatctcgattcttattccctgcttcaatgaggaacgcaacgcacgggagaccattagcgccgcgctgggtcagcggtactggaatgtggaagttatcgccatcaatgacggttcttctgataacacggcggaggtactgcaacagctggcgcgagagcaaccgcgcctgcgggtgattaatctcgcggagaaccaggggaaagccgtggcgctcaaggccggcgctgcggcggcccggggcgatttgctggtctgcattgacggcgacgccctgctcgaccgcgacaccgcggcgtatctggtggcaccgctgattcagtatccccacgttggggccgtcaccgggaatccgcgtattcgcacgcgctcaacgctgattggccgcattcaggtgggcgagttttcttccattattggccttatcaagcgaacgcagcggatctatggccgggtctttaccgtctccggcgtcatcgccgcctttcgccgacaggcgctggcggatgtcgggtactggagcccggacatgatcacagaggatatcgacataagctggaagcttcagcttcgccactgggatatctttttcgagccgcgggcactgtgctggatcctgatgccggagacgctaaaggggctgtggaaacagcgtctgcgctgggcgcaggggggggcagaggtgtttctggttaacctgcgcaagatggcccgctgggagcatcatcgcatgtggcccctgtttcttgagtacgcgctatcaacgctgtgggcgtttgcctatggggcgaccgtggtgttgttcattctcagccatattatccctcttcccgcgaacctggccgttgcgagcctgtttccaccggcgtttaccgggctgctgctgggcgtgatgtgcctgctgcaattcctcgtcagtttgtatatcgagcggcgctacgagcggaaagtggcaggctcgctgttctgggtaatctggttcccgatggtgtactggatgattggcctgtttaccacccttgtggcatttccgaaagtcatgcttaaacgtaaacgcgcccgcgcgcgctggatcagtccggaccggggtaaagggagcattcaatgaacgagaatacgttaattttgactgaacatcggctggcaccgcgtcttttcgatgccgcattaacgctgatagcctggggaggattcctgtttttcctttacgccaggctgtggatgcagttaaccgaggagggcgatcaccgctggagcgtgattatcgcctcttttaatacggtgctggtctatctgctgattgccgcgttcaacggctggctgctgatcctgtggtatcagtacaatcgccgccgcgcgcatgtgaggcggcgtcatccggaaatgttgcgccatgacgagcttgcccaaagttttaacgtcacgccgcaaattatgtccgagatgagccagtacaacttgctgacggtttaccatgaccagattggccggatcattgatttgaagatcagcgagcagcaggaagaggaagagcagtaatgaaacgcccccgcaacatgccctgcgggggcgtttttataacagggagacgttatttatctttcaccacaatcagcggttcaatatcgctctctttcttcaccaccagcgagtcatccccgcgcagacaggttccgccatagttcccgcccacggtaaaagtgcagacctgaatgtatctgccgtcaactttcggcaggcaccatagctgctggtagatatttttacggtcgacaaacttgccgctggactggtccagcagttcgtcctgggcgccgataagatcgatattgctcccgcagcgtccggcgatcggtttaacggcataaccggtccgtttgagcagatcgttgacctcaaaatcggtatccagcaggtaacggtggttcgggaacagctgccacagcaccggcaggatcgccttgttacctgggatcaccgtccacagcggttcaaagaccagcacttccgggcgcagcaggacgtcaatcaggcgcacttcaccttgcgggtgaccggtgcggataggcacggcggcgtactcggtttcgctcacctcgcggatctgctcaatcgccgtttcccacgcccaggttttccatacgcagttgacgtgacggccttcatcatcaatcagttgcccggcggcatcccagctcagcgcccccagtccatgcaggattttggtttcaaacccggcctggatcagcgagcgctgaataaagagcgcgtggtaatcctcttcgatatcgttgtcctgcatgatatggacgaacggccgcgcgtggctgtgcttccatgcgccggtcagctcctccagcaagccttccgccggattgtggccggtgccgcgatagccgtttttcacccactcttcaagaatgagcccgccctcggtatggcaggaggcggaatccgcgttgtactcgtaaaccttgatgccgcgttcatccatgcagaaatccatacgaccggtgatcatatggtgacgacgccactgccaggaaaggcgcagacgcggccagagaattttcgggatgtcgaaaagcgcgagtaagctgtcgtctttcagcaccttgtcggtggcatgaaggtacatcagatgcagttcgttggtggctttgatcagctcctgctcggcgctttcggtaatggtgaagtactggcagggatcgttgttgataacgtggccgttggcgcgaacgtacgcctgttgcagggcgtcgttttcattgagccattttccgtcgaactgacggttgttcttcaatcgcgcgccgctgattttcagcagttcaccgtcgatctccggctgaggaatactgtgttccgtctcctccgtctggatcatccagccgaggatctcggtatcgttgaacgtgtcatgaagcgtatagcaaccgtcctccacgctcagacgcagctcgcgcgtccactgctgccccatcggcagcggggagtgaataacgttctgctcggcaatgcgcactctgtcatccagcagctgggtaatgacggcgacgtggccggtttcatgaaactcaccgcccttttgccagatgagcagcgcaccggcctgcggcgcgcgttttgagccattagcaaaggcctgtagcggcaaaatattgtcgtttaccacctggcgcaaaaaacgcagggagaagatctcccacgccatcccgacgtcggtaaaaacaaacccgtgattgagaaacaggaaacggcgcgcaaactcaacgcactgccatttatggcccatgtattcgttgccgatatagctgcggaattccgcgtcttccgggtagtgacgcggatcgagactgccgtaatttgaagagtaaatcgccacgccacccggcgcataacctaataacgtcccgaagggtgcgtcactgcttaacgttcctttacgcatgtgtccaacctaaaacaggcaggcggcaattttttgttgggttgtcgtcgtctgcacgttgtaattaactgnnnnnnnnnnnnnnnnnnnnnnnnnnnnnnnnnnnnnnnnnnnnnnnnnnnnnnnnnnnnnnnnnnnnnnnnnnnnnnnnnnnnnnnnnnnnnnnnnnnnnnnnnnnnnnnnnnnnnnnnnnnnnnnnnnnnnnnnnnnnnnnnnnnnnnnnnnnnnnnnnnnnnnnnnnnnnnnnnnnnnnnnnnnnnnnnnnnnnnnnnnnnnnnnnnnnnnncgctcgcatcgttaaacggttcctgcatctcctgctacactgcctcaacacaacaccaaaaaggcaggccaacatgtcagataacacctatcagccaccgaaagtgtgggaatggaaacagaataacggcggcgcgttcgccaatatcaaccgtcccgtctcgggcgcgacgcacgagaaagagctacctgtgggcgcgcacccgctccagctgtactctctcggtacgccgaatggacagaaagttaccatcatgctggaagagctgctggcgctgggcgtgacgggcgcggaatacgacgcatggttgatccgcattggtgagggcgatcagttctccagcggttttgtcgacgtgaacccgaactcgaagatcccggccctgcgtgaccactccaccaccccgccgacgcgcgtctttgaatccggcaatatcctgctctacctggccgagaaatttggtcacttcctgccaaaagatccggcaggacgaacggaaaccctgaactggctgttctggttacagggcgcggccccgttcctcggcggcggttttggccacttctataactacgcaccagtgaagattgagtacgctatcgatcgcttcaccatggaagctaaacgcctgttcgacgtgctggacaaacagctggcgcgcggtcgttacgtagcgggtgaggaatataccattgcggatatggcagtctggccatggtttggctgcgtggcgctgggcagcgtgtataacgccgccgagttcctggatgccgggaagtacaccaacgtgcagcgctgggcaaaagatgtggcgaatcgtccggccgttaaacgcgggcgcattgttaaccgtaccaacggcgagctgaacgagcagttacatgagcgtcattcagcaagcgacttcgatacccagacggaagataaacgtcagggttgatccatgaccgggcggttcgccgcccttcttccgcgatgagaaaaatgcgtcagcacgcgtgcgcaaggagcctcgtatgtcagaccagacgctaaaagcgacccgacagcagagtcttatcaccttgctgagtaaaagcgactggctgactaccgatgtgctggctgaaaagctctccgtcagcaaagagaccatccgccgggatctgaagtcgttgcagcagcaggggaagcttctgcgccagcacgggcgcgcgcgtctgattcatccggacagccgcgacagcggtgaaccctttggcgcacgcctgaaaagccattatgccgacaaagccgatattgcccgccacgcgctgggctggataagcgaagggatgaccatcgccctcgacgccagctcaacctgctttcatctggcgcgccagttgccggacatcgacctcaccgtatttaccaacagtctgcctatctgccacgagatggcaaagcgcgagcggatcacgcttatctgctccggcggaacgcttgagcgtaagtatcgctgctatgttaacccggcgctggtgacgcagctaaaagggctggagatcgatctgttcatcttctcgtgtgaaggggtcgatgagcatggcgtcctttgggatccgtccgagcacaacgcgggctttaaggcgctgctgttaaaccgcgccagccagtcgctgctgctgatcgacaaaagtaaatttatgcgggcaagtgaagtgaaaattggtcagctgtcgcaggtgacacagattattcagagcgataaacgtcaggccgccagagacggcctgacacgagaggttacgcggtgagacggaatttctgcactgagcgctggagttcttcggtctgccgttcaagtgcggcggcggcggcggaaacctgctccaccagcgaggcgttctgctgggtcacgccgtccatctgcgtgatggcaacgccgacctgagaaatacctttgctctgctcctctgacgcggtggcgatctgcttcataatgacggtcacttccgtcacgtcgcgcaggatcgcttccatcgtggtgccggtatcgttcaccagctgcgccccctgctccacgcgggcaacggaatctgcaatcagcccttcgatctcttttgccgcattcgcgctgcggctggccagattacgcacctcacccgccacgaccgcaaagccccgcccctgctccccggcccgggccgcttccaccgcggcgttcagcgccagaatattggtctggaaggcgatgctgttgatgacggtagtgatttcagcgatttttttcgagctgtccgaaatgccgctcatggttgtgaccacatcttccaccagcgagccgccgcggctggccgtactggaggcgacatccgcaagctggctggcctggcgcgcgctttcggcgttcagcttcaccgttgcggttagctgctccatgctggccgcggtctcttccagcgcggcggcctgctcttcggtacgcgaagagagatcgttattcccgctggagatctccgttgccccgcgccagatattctcgctgccggaacgaatcgtgctgaccgcttcccgcaggctgtcctgcatggcgctcagcagcggcaccagttgccccacgcagttgcggccaaaggattcaatcggctggctgagatcgccctgcgcaatctggcggaactgctgacggatacgatccagcggttttaccagtatcgccaccaggtagcggtcggtgaacagcaggatcaacagacccacgatcgtggcggtgataatcaccgtccgggtcatgctggtgaggccgtcgaccaccacgcgcgtgctgtcgagcgccttcgccgcggtgttgttaaagttctcagccgctgacccgaatgcacggctt
